(19) United States
(12) Patent Application Publication
(10) Pub. No.: US 2012/0096596 A1
(43) Pub. Date: Apr. 19, 2012

(54) REGULATORS INVOLVED IN MUSHROOM FORMATION

(76) Inventors: Robin Arthur Ohm, Utrecht (NL); Jan Fokke De Jong, Utrecht (NL); Luis Gaston Lugones, Bunnik (NL); Herman Abel Bernard Wösten, Zeist (NL)

(21) Appl. No.: 13/265,449

(22) PCT Filed: Apr. 20, 2010
(86) PCT No.: PCT/NL10/50206

§ 371 Date: Dec. 30, 2011

Related U.S. Application Data
(60) Provisional application No. 61/212,953, filed on Apr. 20, 2009.

(51) Int. Cl. A01H 15/00; A01G 1/04; G01N 33/566; C12N 15/63; C40B 30/04

(52) U.S. Cl. 800/297; 435/320.1; 506/9; 436/501; 47/1.1

(57) ABSTRACT

The invention relates to a fungus or a mushroom and to a method of producing it wherein the fungus/mushroom has an increased expression level of a polypeptide and/or has a decreased expression level of a polypeptide, wherein the polypeptide comprises an amino acid sequence that has at least 40% amino acid identity or similarity with a sequence selected from SEQ ID NO:1-200 and/or that has at least 50% amino acid identity or similarity with a sequence selected from SEQ ID NO:201-208.

### FIELD OF THE INVENTION

[0001] The invention relates to a mushroom and to a method of producing said mushroom wherein the mushroom has an increased expression level of a polypeptide and/or a decreased expression level of a polypeptide, wherein the polypeptide is encoded by a nucleotide sequence that encodes a protein that has at least 40% identity or similarity with the amino acid sequence selected from the SEQ ID NO:1-200 and/or that has at least 50% identity or similarity with an amino acid sequence selected from the SEQ ID NO: 201-208.

### BACKGROUND OF THE INVENTION

[0002] Formation of mushrooms is a highly complex developmental process. As an example, we describe a generalized scheme for formation of agaric fruiting bodies such as those of Agaricus bisporus (see Kües, 2000; Umar and van Griensven, 1997). After a “critical mass” of submerged mycelium has been formed, hyphae escape the substrate to grow into the air. These hyphae form aggregates, which are called hyphal knots or nodules. Within the knots hyphae aggregate forming a fruiting body initial. Within the core of the initial differentiation of cells occurs. The lower part will develop into the stipe, while the cap will be formed from the upper part. Within the cap different tissues develop. In the inner part of the cap the pileus trama and gills with a hymenium can be distinguished. In the hymenium different cell types are formed, among which the basidia. In the basidia karyogamy and meioses take place, ultimately resulting in basidiospores. That development of fruiting bodies is complex is also exemplified by the fact that formation of the different tissues overlaps in time. Moreover, cells in the developing mushroom differ in diameter, length, the number of septa, nuclei and vacuoles as well as the molecular composition (e.g. the content of reserve carbohydrate).

[0003] Spores formed by A. bisporus contain two nuclei with a different mating type. Germination of these spores thus results in a self-fertile heterokaryotic mycelium, containing a variable number of both nuclear types. In contrast, the fertile stage of a majority of mushroom forming fungi results from a mating of two compatible strains with different mating type loci. During mating, partners exchange nuclei. These nuclei do not fuse but are maintained in the hyphal compartment. Such mycelia are therefore called heterokaryotic (in the case that each compartment contains one nucleus of each type it is called a dikaryon). They can form fruiting bodies under the appropriate environmental and nutritional conditions. The mating type loci are the master regulators of fruiting body development. Little is known about the mating type system of A. bisporus. It is assumed that this fungus contains a single mating type locus. The mating type loci of Schizophyllum commune and Coprinus cinereus and their role in development have been studied well (for a review see Kües, 2000). Both S. commune and C. cinereus contain two mating type loci. The A locus encodes homeodomain proteins. These proteins function by forming heterodimers with homeodomain proteins encoded in a compatible A locus. Some of these homeodomain proteins also seem to form functional homodimers. The B locus encodes pheromones and receptors. These receptors can bind pheromones encoded by other alleles of the B locus. Both the A and the B locus regulate distinct cellular processes involved in establishing the dikaryotic mycelium. However, they co-ordinately regulate fruiting body initiation. Clearly, the presence of compatible A and B mating type loci is not sufficient for fruiting. For instance, in C. cinereus aggregates formed by a dikaryon can develop into a fruiting initial or into sclerotia. Environmental conditions such as light and nutrient availability will determine which developmental program will be switched on.

[0004] Little is known about regulatory proteins other than those encoded by the mating type loci that are involved in mushroom formation in general and fruiting initiation in particular. In contrast to A. bisporus, at least some mutants and genes have been identified in S. commune and C. cinereus. The fbf mutation is a frequently observed recessive mutation in S. commune that suppresses dikaryon specific processes in vegetative hyphae as well as formation of fruiting bodies (Springer and Wessels, 1989). The FBF gene thus seems to be an activator. On the other hand, the FRT gene of S. commune suppresses expression of dikaryon-specific genes in monokaryons (Horton et al., 1999). Other mutant strains affected in fruiting body development in S. commune have been described but the genes involved have not been identified. These mutants are affected in the morphology of the fruiting body or its sporulation (Raper and Krongelb, 1958; Bromberg and Schwalb, 1977). Recently, several genes involved in fruiting body formation have been identified in C. cinereus. The pcc1 gene functions in A regulated development and encodes a putative DNA binding protein (Murata et al., 1998). A mutation in the gene resulted in a complete program of sexual differentiation independent of the mating type genes. The function of pcc1 is, however, not known. The ich1 and the eln2 genes are involved in differentiation of the primordium (Muraguchi et al., 1998; 2000). Mutations in these genes affect pileus and stipe formation, respectively. Clearly, these data do not present a picture how fruiting body formation is regulated at the molecular level.

[0005] So far, genes involved in regulation/initiation of mushroom production have not been described. These genes control mushroom formation and are therefore targets to improve mushroom production, to improve quality of mushrooms, to increase predictability of mushroom production and to enable production of mushrooms on substrates on which they can not yet be produced efficiently.

### DESCRIPTION OF THE INVENTION

[0006] We have studied expression of putative transcription factors in the model system of mushroom formation Schizophyllum commune. S. commune can be found throughout the world. It is a wood rotting basidiomycete that forms fruiting bodies on felled hard woods but it can also be found on softwood and grass silage. The basidia that are formed in the gills are dispersed and can give rise to a monokaryotic mycelium. Fusion of monokaryons with different alleles in the MATA and MATB mating type loci results in a fertile dikaryon that can form fruiting bodies under the appropriate environmental conditions. S. commune can form sporulating fruiting bodies on simple synthetic media within a few days. This and the fact that monokaryons are available was the reason that S. commune became a model system for fruiting basidiomycetes. Both classical and molecular genetics have been established in S. commune. We are confident that regulatory programs in S. commune, A. bisporus and other basidiomycetes are quite conserved. We have shown that the promoters of the sc3 and gpd genes of S. commune are active in the non-related basidiomycete Pycnoporus cinnabarinus (Alves et al., 2004).

[0007] Genes involved in timing of mushroom formation and in morphology and yield are targets to improve (i.e., for mushrooms that are currently produced commercially, including but not limited to the common white button mushroom [the “champignon”], the oyster mushroom and shiitake) or to enable (i.e. for mushrooms that are currently not produced in a commercial setting) commercial mushroom formation. We have identified 200 genes in the genome of S. commune that encode putative regulators whose expression change during mushroom formation. These genes could be involved in mushroom formation. We have found that inactivation of eight of these genes affected mushroom production. The production was either promoted or decreased, if present at all. Homologues of these putative regulatory genes can be found in other mushroom forming fungi. In the present invention as described further herein, we will make use of the genes which encode putative transcriptional regulators and whose expression change during mushroom formation to 1) enable commercial production of mushrooms that can not yet be produced in a commercial setting, 2) improve yield of mushrooms, 3) improve quality (e.g. shape and homogeneity of morphology), 4) improve predictability of the process of mushroom formation and/or 5) enable production of mushrooms on substrates that can not yet be used for commercial mushroom production.

[0008] Mushrooms may be defined as a fleshy, spore-bearing fruiting body of a fungus, typically produced above ground on soil or on its food source. The standard for the name “mushroom” is the cultivated white button mushroom, Agaricus bisporus, hence the word mushroom is most often applied to those fungi (Basidiomycota, Agaricomycetes) that have a stem (stipe), a cap (pileus), and gills (lamellae, sing. lamella) on the underside of the cap, just as do store-bought white mushrooms. Mushrooms may also have pores in stead of lamellae. The word “mushroom” can also be used for a wide variety of fungal fruiting bodies that produce sexual spores and that either or not have stems, and the term is used even more generally, to describe both the fleshy fruiting bodies of some Ascomycota and the woody or leathery fruiting bodies of some Basidiomycota. Forms deviating from the standard morphology usually have more specific names, such as “puffball”, “stinkhorn”, and “morel”, and gilled mushrooms themselves are often called “agarics” in reference to their similarity to Agaricus or their place Agaricales. By extension, the term “mushroom” can also designate the entire fungus when in culture or the thallus (called a mycelium) of species forming the fruiting bodies called mushrooms, or the species itself.

### Polypeptide

[0009] In a first aspect, there are provided 200 polypeptides suspected to be involved in the regulation of the production of a mushroom. These polypeptides are identified in Table 1 and are available in a public database (http://jgi.doe.gov/Scommune). This application concerns polypeptides that have at least 40% amino acid identity or similarity with a sequence selected from SEQ ID NO:1-200 (Table 1) and/or that have at least 50% amino acid identity or similarity with a sequence selected from SEQ ID NO:201-208 (Table 4). Table 5 links the name of each polypeptide to a given SEQ ID NO corresponding to an amino acid sequence. These polypeptides may also be named regulator or transcription factor (TF) since they have been identified by the presence of a motif or domain known to be present in a TF such as a known DNA binding domain, such as a zinc finger domain (for more details see example 1). TF genes are preferably identified based on:

1) automatic annotation using GO (Gene Ontology) (Ashburner et al., 2000),
2) KOG (euKaryotic Orthologous Groups) (Koonin et al., 2004) and
3) PFAM algorithms (Finn et al., 2008).

[0010] Identified putative TFs are preferably subsequently blasted (Blast N and blastP) against the genome to identify putative TF genes that were missed in the automatic annotation.

[0011] In a second step, their expression is analysed during the production of a mushroom. A TF of the invention is expressed during at least part of the life cycle of a mushroom. For example, the expression of a TF of the invention may change during development of a mushroom.

[0012] “Polypeptide” as used herein refers to any peptide, oligopeptide, polypeptide, gene product, expression product, or protein. A polypeptide is comprised of consecutive amino acids. The term “polypeptide” encompasses naturally occurring or synthetic molecules.

[0013] Each amino acid sequence described herein by virtue of its identity or similarity percentage (at least 40% identity or similarity for SEQ ID NO's 1-200; at least 50% identity or similarity for SEQ ID NO's 201-208) with a amino acid sequence respectively has in a further preferred embodiment an identity of at least 42%, 45%, 50%, 55%, 60%, 65%, 70%, 75%, 80%, 82%, 85%, 90%, 95%, 96%, 97%, 98%, 99% or 100% identity or similarity with the given polypeptide. In a preferred embodiment, sequence identity or similarity is determined by comparing the whole length of the sequences as identified herein.

[0014] Each nucleotide sequence encoding a polypeptide as described herein may encode a fungal polypeptide, i.e. a polypeptide with an amino acid sequence that is identical to that of a polypeptide that naturally occurs in a fungal or a mushroom organism. The functionality of such polypeptide depends on the relatedness (identity or similarity percentage) of the amino acid sequence compared to that of the corresponding identified SEQ ID NO.

[0015] A TF is preferably said to be functional when said TF has a detectable transcriptional activity during at least part of the life cycle of a mushroom. Preferably a mushroom is a Schizophyllum. More preferably strain 4-8 (FGSC#9210) of Schizophyllum commune (Fungal Genetic Stock Center, Missouri, USA). The presence of an activity, preferably a transcriptional activity, is preferably assessed by inactivating a nucleotide sequence encoding said TF in said fungus or mushroom and analysing whether a mushroom will be produced compared to the mushroom production of a control mushroom wherein said nucleotide sequence has not been inactivated. If a mushroom is not produced or if less or more mushroom is produced, said TF is said to exhibit an activity, preferably a transcriptional activity, and therefore to be functional. Less or more mushroom are later defined herein.

[0016] Alternatively or in combination with a previous embodiment, a polypeptide of the invention may be a natural polypeptide or it may be a polypeptide that does not occur naturally. A polypeptide that does not occur naturally may be a polypeptide encoded by a nucleic acid sequence that is mutated for example by using site directed mutagenesis or a mutation prone PCR.

### Nucleic Acid Construct

[0017] In a further aspect, there is provided a nucleic acid construct comprising a nucleotide sequence encoding a polypeptide that comprises an amino acid sequence that is encoded by a nucleotide sequence selected from:
[0018] (a) a nucleotide sequence that encodes an amino acid sequence that has at least 40% amino acid identity or similarity with an amino acid sequence selected from SEQ ID NO:1-200; and,
[0019] (b) a nucleotide sequence that encodes an amino acid sequence that has at least 50% amino acid identity or similarity with an amino acid sequence selected from SEQ ID NO:201-208
   wherein the nucleotide sequence is optionally operably linked to a promoter that is capable of driving expression of the nucleotide sequence in a fungus and/or in a mushroom.

[0020] A nucleic acid construct is defined as a nucleid acid molecule, which is isolated from a naturally occurring gene or which has been modified to contain segments of nucleic acid which are combined or juxtaposed in a manner which would not otherwise exist in nature. A nucleic acid molecule is represented by a nucleotide sequence. Optionally, a nucleotide sequence present in a nucleic acid construct is operably linked to one or more control sequences, which direct the production of said polypeptide in a fungus.

[0021] Operably linked is defined herein as a configuration in which a control sequence is appropriately placed at a position relative to the nucleotide sequence coding for the polypeptide of the invention such that the control sequence directs the production of the polypeptide of the invention in a fungal cell and/or in a mushroom.

[0022] Expression will be understood to include any step involved in the production of the polypeptide including, but not limited to transcription, post-transcriptional modification, translation, post-translational modification and secretion.

[0023] Control sequence is defined herein to include all components, which are necessary or advantageous for the expression of a polypeptide. At a minimum, the control sequences include a promoter and transcriptional and translational stop signals.

[0024] As used herein, the term “promoter” refers to a nucleic acid fragment that functions to control the transcription of one or more genes or nucleic acids, located upstream with respect to the direction of transcription of the transcription initiation site of the gene, and is related to the binding site identified by the presence of a binding site for DNA-dependent RNA polymerase, transcription initiation sites and any other DNA sequences, including, but not limited to transcription factor binding sites, repressor and activator protein binding sites, and any other sequences of nucleotides known to one skilled in the art to act directly or indirectly to regulate the amount of transcription from the promoter. Within the context of the invention, a promoter preferably ends at nucleotide-1 of the transcription start site (TSS).

[0025] A promoter is preferably capable of driving expression of the nucleotide sequence in a fungus and/or in a mushroom. Preferred promoters include: promoters that are constitutively expressed such as that of glyceraldehyde-3-phosphate-dehydrogenase (gpd) of Schizophyllum commune (Harmsen et al., 1992) (SEQ ID NO: 209).

[0026] The invention also relates to an expression vector comprising a nucleic acid construct of the invention. Preferably, an expression vector comprises a nucleotide sequence of the invention, which is operably linked to one or more control sequences, which direct the production of the encoded polypeptide in a fungal cell and/or in a mushroom. An expression vector may be seen as a recombinant expression vector. An expression vector may be any vector which can be conveniently subjected to recombinant DNA procedures and can bring about the expression of a nucleotide sequence encoding a polypeptide of the invention in a fungus and/or in a mushroom. Depending on the identity of the fungus/mushroom wherein this expression vector will be introduced and on the origin of the nucleotide sequence of the invention, the skilled person will know how to choose the most suited expression vector and control sequences.

[0027] Single or multiple copies of a nucleic acid construct may be introduced into a fungal cell and/or a mushroom. A nucleic acid construct may be maintained episomally and thus comprises a sequence for autonomous replication, such as an ARS sequence. Suitable episomal nucleic acid constructs may e.g. be based on the yeast 2μ or pKD1 (Fleer et al., 1991) plasmids. Alternatively, a nucleic acid construct is integrated in one or more copies into the genome of a fungal cell and/or a mushroom. Integration into a fungal cell and/or a mushroom genome may occur at random by illegitimate recombination or via homologous recombination at a targeted integration site. Preferably, a nucleic acid construct integrates into the genome of a fungus and/or a mushroom. This type of nucleic acid construct may comprise a bacterial cloning vehicle, a nucleotide sequence encoding a TF and a selection marker. A selection marker may confer antibiotic resistance or be an auxotrophic marker. Such markers are known to the skilled person. Nucleic acid constructs comprising a bacterial cloning vehicle and a selection marker are for example disclosed in Schuren et al (1994) and Munoz-Rivas et al (1986). Alternatively, this type of nucleic acid construct may be synthesised using techniques such as for example PCR.

[0028] If the expression level of a polypeptide of the invention is to be increased, a nucleotide sequence encoding said polypeptide is introduced into an expression construct. If the expression level of a polypeptide of the invention is to be decreased, a nucleotide sequence encoding said polypeptide may be introduced into an inactivation construct. An inactivation construct is known to the skilled person. Such construct may comprise a nucleotide sequence encoding a mutated polypeptide or containing the flanking sequences of a nucleotide sequence encoding said polypeptide. Such a construct should integrate at the endogenous locus of said polypeptide to replace the endogenous gene and inactivate it. Alternatively, the inactivation construct may contain a sequence inducing RNAi. RNAi techniques are known to the skilled person (De Jong et al, 2006).

[0029] Inactivation of the polypeptide may be due to the inactivation of the corresponding gene or nucleotide sequence. In the case of an RNAi like inactivation, mRNA levels are reduced. The inactivation construct may also result in mRNA levels similar to that observed in the wild-type. In this case, the encoded mutated polypeptide has a decreased activity, wherein said decreased activity is assessed by comparison with the activity of the polypeptide the mutated polypeptide originates or derives from. An activity of a polypeptide may be assessed using an assay known to the skilled person. Such assay may include the introduction of said mutated polypeptide into a fungus and compare an activity of said expressed mutated polypeptide with corresponding activity of the polypeptide the mutated polypeptide originates from. An activity of a mutated polypeptide may be compared with the activity of a control polypeptide. If a fungus is a Schizophyllum, a control activity of a control polypeptide may be an activity as present in the strain Schizophyllum commune strain 4-8 (FGSC #9210). Preferably a mutated polypeptide has no detectable activity. An activity has the same meaning as a transcriptional activity or being functional as earlier defined herein.

[0030] Suitable procedures for transformation of fungus are well known to the skilled person. For example, the mushroom forming fungus can be transformed using protoplasts using for instance procedures according to van Peer et al (2009).

### Fungal Cell/Mushroom

[0031] In a further aspect, there is provided a fungus and/or a mushroom with an increased expression level of a polypeptide and/or a decreased expression level of a polypeptide, wherein the polypeptide is encoded by an amino acid sequence that has at least 40% amino acid identity or similarity with a sequence selected from SEQ ID NO:1-200, and/or at least 50% amino acid identity or similarity with SEQ ID NO's: 201-208.

[0032] In a preferred embodiment, a fungus and/or a mushroom comprises a nucleic acid construct or expression vector of the invention as defined in the previous paragraph. The choice of the fungus and/or mushroom will to a large extent depend upon the source of the nucleic acid sequence of the invention. Depending on the identity of the fungus, the skilled person would know how to transform it with the construct or vector of the invention.

[0033] In a preferred embodiment, there is provided a fungus and/or a mushroom with an increased expression level of a polypeptide and a decreased expression level of another polypeptide. In another preferred embodiment, there is provided a fungus and/or a mushroom with an increased expression level of at least one polypeptide of the invention and/or a decreased expression level of at least another polypeptide of the invention.

[0034] A polypeptide of the invention that is expressed in a fungus and/or a mushroom, as is described above, may be a heterologous polypeptide or an endogenous polypeptide, as is further defined below. Preferably, a polypeptide of the invention that is expressed in a fungus and/or a mushroom is a heterologous polypeptide, for example when a polypeptide of the invention is used to improve the production of an edible mushroom. Where herein it is said that a fungus and/or a mushroom has an “increased expression level of a polypeptide”, this includes expression of a heterologous polypeptide, although as a definition the heterologous polypeptide is not naturally expressed by a fungus and/or a mushroom. However, the “increased” expression level in this situation is construed to mean that there is a detectable expression of the heterologous polypeptide whereas a control fungus and/or mushroom does not have detectable expression of the heterologous polypeptide.

[0035] A polypeptide of which the expression level is decreased, as is described above, is an endogenous polypeptide.

[0036] The increased and/or decreased expression as identified earlier does not need to occur during the whole life cycle of the mushroom/fungus. Depending on the identity of the polypeptide, its expression may be increased respectively decreased during part of the life cycle of the mushroom/fungus. A fungus may be any fungus. Preferably a fungus is a fungus wherein a nucleotide encoding a polypeptide as identified earlier herein is involved during the production of said fungus. A fungus is preferably a fungus which produces a mushroom. More preferably, a mushroom that is attractive to be produced or which is suspected to be attractive to produce a substance of interest. It may be due to commercial reasons. In an embodiment, a fungus is a Basidiomycete or an Ascomycete, preferably a Basidiomycete, preferably an Agaricales, more preferably a Schizophyllaceae and even more preferably a Schizophyllum. More preferred is a Schizophyllum commune. Even more preferably Schizophyllum commune strain 4-8 (FGSC#9210). Preferred Agaricales are for example Agaricus bisporus, Pleurotus ostreatus and Lentius edodus.

[0037] According to a preferred embodiment, a fungus and/or a mushroom has an expression level of a polypeptide that has been increased, i.e. produces more than normal amounts or has an increased production level of said polypeptide of the invention and/or exhibits a higher activity for said polypeptide than the parental fungus/mushroom this fungus/mushroom derives from when both cultured and/or assayed under the same conditions.

[0038] “Producing more than normal amount or having an increased production level of said polypeptide” is herein defined as producing more of the polypeptide of the invention than what the parental fungus/mushroom the transformed fungus/mushroom is derived from will produce when both types of cells (parental and transformed cells) are cultured under the same conditions. The increase may occur during part of the life cycle of a fungus/mushroom and/or during a particular stage of the life cycle of said fungus/mushroom. Preferably, a fungus/mushroom of the invention produces at least 3%, 6%, 10% or 15% more of the polypeptide of the invention than the parental fungus/mushroom the transformed fungus/mushroom is derived from will produce when both types of cells (parental and transformed cells) are cultured under the same conditions. Also fungus which produces at least 20%, 30%, 40%, 50%, 60%, 70%, 80%, 90%, 100%, 150%, 500%, 1000%, 10.000% or more of said polypeptide than the parental fungus/mushroom are preferred. According to another preferred embodiment, the production level of the polypeptide of the fungus/mushroom of the invention is compared to the production level of the same polypeptide in a control strain. According to an even more preferred embodiment, when the fungus/mushroom of the invention is a Schizophyllum strain, the production level of the polypeptide of the fungus/mushroom of the invention is compared to the production level of the Schizophyllum commune strain 4-8 (FGSC #9210), which is taken as control.

[0039] The assessment of the production level of the polypeptide may be performed at the mRNA level by carrying out a Northern Blot or an array analysis and/or at the polypeptide level by carrying out a Western blot. All these methods are well known to the skilled person.

[0040] “Exhibiting a higher or increased polypeptide activity” is herein defined as exhibiting a higher polypeptide activity than the one of the parental fungus/mushroom the transformed fungus/mushroom derives from using an assay specific for an activity of said polypeptide. Preferably, the fungus/mushroom of the invention exhibits at least a 3%, 6%, 10% or 15% higher activity than the parental fungus/mushroom the transformed fungus/mushroom derives from will exhibit as assayed using a specific assay for an activity of said polypeptide. Also fungus/mushroom which exhibits at least 20%, 30%, 40%, 50%, 60%, 70%, 80%, 90%, 100%, 150%, 500%, 1000%, 10.000% or more of said activity than the parental fungus/mushroom is preferred. According to another preferred embodiment, the level of an activity of said polypeptide of the fungus/mushroom of the invention is compared to the corresponding activity of the Schizophyllum commune strain 4-8 (FGSC #9210) strain, which is taken as control.

[0041] The skilled person will know which activity could be used for each polypeptide. In a preferred embodiment, said activity is a transcriptional activity which may be assessed as defined earlier herein.

[0042] The over-expression or increase of expression or up-regulation may have been achieved by conventional methods known in the art, such as by introducing more copies of a nucleotide encoding a polypeptide into a fungus/mushroom, be it on a carrier or in the chromosome, than naturally present. Alternatively, a nucleotide encoding said polypeptide can be over-expressed by fusing it to a highly expressed or strong promoter suitable for high level protein expression in the selected fungus/mushroom, or combination of the two approaches. The skilled person will know which strong promoter is the most appropriate depending on the identity of the fungus/mushroom. In this context, a strong promoter preferably means a promoter which is able to induce a higher expression of the nucleotide sequence operably linked to it than the expression of said nucleotide sequence when it is operably linked to its endogenous promoter. Over-expression may also be achieved by other methods such as for example by increasing mRNA stability or by introducing introns.

[0043] According to a preferred embodiment, a fungus/mushroom has an expression level of a polypeptide that has been decreased, i.e. produces less than normal amounts or has a decreased production level of said polypeptide of the invention and/or exhibits a lower activity for said polypeptide than the parental fungus/mushroom this fungus/mushroom is derived from when both cultured and/or assayed under the same conditions.

[0044] “Producing less than normal amount or having a decreased production level of said polypeptide” is herein defined as producing less of the polypeptide of the invention than what the parental fungus/mushroom the transformed fungus/mushroom is derived from will produce when both types of cells (parental and transformed cells) are cultured under the same conditions. Preferably, a fungus/mushroom of the invention produces at least a 3%, 6%, 10% or 15% less of the polypeptide of the invention than the parental fungus/mushroom the transformed fungus/mushroom is derived from will produce when both types of cells (parental and transformed cells) are cultured under the same conditions. Also fungus/mushroom which produces at least 20%, 30%, 40%, 50%, 60%, 70%, 80%, 90%, 100% or 150% less of said polypeptide than the parental fungus are preferred. It is also encompassed by the present invention that no expression of said polypeptide is detectable. Preferably said expression is not detectable during at least part of the life cycle of said fungus/mushroom. According to another preferred embodiment, the production level of the polypeptide of the fungus/mushroom of the invention is compared to the production level of the production level of the same polypeptide in a control strain. According to an even more preferred embodiment, when the fungus/mushroom of the invention is a Schizophyllum strain, the production level of the polypeptide of the fungus/mushroom of the invention is compared to the production level of the Schizophyllum commune strain 4-8 (FGSC #9210), which is taken as control.

[0045] The assessment of the production level of the polypeptide may be performed at the mRNA level by carrying out a Northern Blot or an array analysis and/or at the polypeptide level by carrying out a Western blot. All these methods are well known to the skilled person.

[0046] “Exhibiting a lower or decreased polypeptide activity” is herein defined as exhibiting a lower polypeptide activity than the one of the parental fungus/mushroom the transformed fungus/mushroom is derived from using an assay specific for an activity of said polypeptide. Preferably, the fungus/mushroom of the invention exhibits at least 3%, 6%, 10% or 15% lower activity than the parental fungus/mushroom the transformed fungus/mushroom derives from will exhibit as assayed using a specific assay for an activity of said polypeptide. Also fungus/mushroom which exhibits at least 20%, 30%, 40%, 50%, 60%, 70%, 80%, 90%, 100% or 150% less of said activity than the parental fungus/mushroom is preferred. According to another preferred embodiment, the level of an activity of said polypeptide of the fungus/mushroom of the invention is compared to the corresponding activity of the Schizophyllum commune strain 4-8 (FGSC #9210) strain, which is taken as control. Here also an activity of a polypeptide of the invention preferably refers to a transcriptional activity of said polypeptide as earlier defined herein.

[0047] According to a more preferred embodiment, a fungus/mushroom does not produce any detectable amounts of the polypeptide of the invention and/or does not exhibit any detectable activity of said polypeptide. Preferably, a fungus/mushroom does not produce or produces substantially no polypeptide of the invention.

[0048] The lowering of the expression level of the polypeptide of the invention and/or the lowering of its activity level may have been achieved by conventional methods known in the art, such as by inactivating or down-regulating or decreasing the expression level of an endogenous nucleotide encoding said polypeptide of said fungus/mushroom.

[0049] The term “endogenous” when used with respect to a nucleic acid or polypeptide molecule refers to a nucleic acid or polypeptide as natively expressed in a fungus/mushroom, preferably in a wild type state.

[0050] The term “heterologous” is used as opposite of “endogenous”. The term “heterologous” when used with respect to a nucleic acid or polypeptide molecule refers to a nucleic acid or polypeptide from a foreign fungus/mushroom which does not occur naturally as part of a given fungus/mushroom (genome or DNA or RNA from said fungus) or which is found in a fungus/mushroom or location or locations in the genome or DNA or RNA sequence that differ from that in which it is found in nature. Heterologous nucleic acids or proteins are not endogenous to the fungus/mushroom into which they are introduced, but have been obtained from another fungus/mushroom or synthetically or recombinantly produced. Generally, though not necessarily, such nucleic acids encode proteins or polypeptides that are not normally produced by the fungus in which the DNA is transcribed or expressed, similarly exogenous RNA codes for proteins not normally expressed in the fungus/mushroom in which the exogenous RNA is present. Furthermore, it is known that a heterologous protein or polypeptide can be composed of homologous elements arranged in an order and/or orientation not normally found in a fungus/mushroom in which it is transferred, i.e. the nucleotide sequence encoding said protein or polypeptide originates from the same species but is substantially modified from its native form in composition and/or genomic locus by deliberate human intervention. Heterologous nucleic acids and proteins may also be referred to as foreign nucleic acids or proteins. Any nucleic acid or protein that one skilled in the art would recognize as heterologous or foreign to a fungus/mushroom in which it is expressed is herein encompassed by the term heterologous nucleic acid or protein. The term heterologous also applies to non-natural combinations of nucleic acid or amino acid sequences, i.e. combinations where at least two of the combined sequences are foreign with respect to each other.

[0051] This inactivation or down regulation may have been achieved by deletion of one or more nucleotides in the encoding gene. Alternatively, it may have been caused by an RNAi-like mechanism. In another embodiment, the invention relates to a fungus/mushroom which has a mutation in its gene or nucleotide encoding said polypeptide. Preferably to construct a fungus/mushroom having an inactivated nucleotide encoding said polypeptide, a replacement or inactivation vector is prepared and is subsequently introduced into a fungus/mushroom by transformation. The skilled person knows how to construct such a vector. For example, such vector may comprise flanking regions of a nucleotide coding for a polypeptide with a selection marker gene present in between said flanking regions.

[0052] Alternatively or in combination with the inactivation of the endogenous nucleotide encoding said polypeptide, the expression of said nucleotide encoding said polypeptide can be lowered by fusing it to a weak promoter suitable for low level protein expression in the selected fungal organism/selected mushroom. A weak promoter is herein defined as a promoter which is able to induce a lower expression of the nucleotide sequence operably linked to it than the expression of said nucleotide sequence when it is operably linked to its endogenous promoter.

[0053] Alternatively or in combination with any of the mentioned ways of obtaining a fungus/mushroom of the invention, one may cross natural isolates of fungus/mushroom with different degrees of expression of the target genes (i.e. nucleotide encoding polypeptide as identified herein) or one may modify the expression of these genes by mutation, by genetic modification, or by other methods such as the application of a chemical or a physical stimulus. A way of modifying the expression of these polypeptides is to submit a fungus to classical mutagenesis and screening for a fungus/mushroom having a desired expression level of said polypeptides as identified herein.

[0054] In a preferred embodiment, a fungus/mushroom is provided wherein the polypeptide whose expression level is increased comprises an amino acid sequence that has at least 40% amino acid identity or similarity with a sequence selected from the group consisting of SEQ ID NO: 29; 177; 20; 56; 4; and/or that has at least 50% amino acid identity or similarity with a sequence selected from the group consisting of SEQ ID NO: 204; 207; 208; 202; 201, and wherein the polypeptide whose expression level is decreased comprises an amino acid sequence that has at least 40% amino acid identity or similarity with a sequence selected from the group consisting of SEQ ID NO: 55; 21; 54; and/or that has at least 50% amino acid identity or similarity with a sequence selected from the group consisting of SEQ ID NO: 206; 205; 203.

[0055] The 200 identified genes are present in Table 1. In order to know whether the expression of a given gene/nucleotide of Table 1 has to be increased or decreased, the skilled person may decrease, preferably inactivate this gene in a given fungus or mushroom. Preferably a mushroom is a Schizophyllum. More preferably strain 4-8 (FGSC#9210) of Schizophyllum commune. Subsequently, one analyzes whether a mushroom will be produced compared to the mushroom production of a control mushroom wherein said nucleotide sequence has not been inactivated. Ways of inactivating a gene have been described herein.

[0056] If a mushroom is not produced or if less mushroom is produced, the expression level of said gene/nucleotide sequence or corresponding expression level of activity of the encoded polypeptide is preferably to be increased in a fungus/mushroom encompassed by the present invention.

[0057] On the contrary, if a mushroom is produced or if more mushroom is produced, said gene/nucleotide sequence or corresponding expression level of activity of the encoded polypeptide is preferably to be decreased in a fungus/mushroom encompassed by the present invention. However, should clusters of mushrooms be avoided, then the expression level of activity of the encoded polypeptide is preferably to be increased in a fungus/mushroom encompassed by the present invention. For example, when it is desired that a mushroom develops that is not hindered by other, perhaps smaller, mushrooms in their vicinity that do not fully develop. For example, the inventors found that inactivation of SEQ ID NO: 21, 54, 55 led to more mushroom production. Therefore, in order to produce more mushrooms, it is preferred to reduce the expression of a polypeptide comprising an amino acid sequence with identity or similarity to SEQ ID NO: 21, 54, or 55 as further defined elsewhere herein. However, should fewer but larger mushrooms be desired, it is preferred to over-express a polypeptide comprising an amino acid sequence with identity or similarity to SEQ ID NO: 21, 54, or 55.

[0058] The meaning of less mushroom is preferably at least a 3%, 6%, 10% or 15% less of the mushroom than the parental mushroom the transformed mushroom is derived from will produce when both types of cells (parental and transformed cells) are cultured under the same conditions. Also at least 20%, 30%, 40%, 50%, 60%, 70%, 80%, 90%, 100% or 150% less of said mushroom than the parental mushrooms are preferred. It is also encompassed by the present invention that no mushroom is detectable.

[0059] The meaning of more mushroom is preferably at least a 1%, 3%, 6%, 10% or 15% more mushroom than the parental mushroom the transformed mushroom derives from will produce when both types of cells (parental and transformed cells) are cultured under the same conditions. Also at least 20%, 30%, 40%, 50%, 60%, 70%, 80%, 90%, 100%, 150%, 500%, 1000%, 10.000% or more of said mushroom than the parental mushrooms are preferred.

[0060] Detection of mushroom is preferably done visually, such as for example by determining the number of mushrooms in a petridish, a container with substrate or on a mushroom bed.

[0061] In the experimental part some genes identified in Table 1 have already been inactivated. Results are presented in Table 3. From these results, we conclude that in a preferred embodiment, a fungus/mushroom is provided wherein the polypeptide whose expression level is increased comprises an amino acid sequence that has at least 50%, 55%, 60%, 65%, 70%, 75%, 80%, 82%, 85%, 90%, 95%, 96%, 97%, 98%, 99% or 100% amino acid identity or similarity with a sequence selected from the group consisting of SEQ ID NO: 204, 207, 208, 202 and 201 and wherein the polypeptide whose expression level is decreased comprises an amino acid sequence that has at least 50%, 55%, 60%, 65%, 70%, 75%, 80%, 82%, 85%, 90%, 95%, 96%, 97%, 98%, 99% or 100% amino acid identity or similarity with a sequence selected from the group consisting of SEQ ID NO: 206, 205 and 203.

[0062] SEQ ID NO: 204, 207, 208, 202 and 201 encode parts of fst4, hom2, wc2, c2h2, briI respectively. Corresponding proteins are identified by the following ID in Table 1: 66861; 257987, 13988, 114363, 255701 (SEQ ID NO: 29; 177; 20; 56; 4, respectively).

[0063] SEQ ID NO: 206, 205 and 203 encode for parts of hom1, gat1, and fst3 respectively. Corresponding proteins are identified by the following ID in table 1: 257652, 255004, 257422 (SEQ ID NO: 55; 21; 54, respectively).

[0064] Such fungus/mushroom is attractive to be used in many different applications.

[0065] These procedures would improve/enable mushroom production. Improvement or enabling commercial mushroom production may result from
[0066] growth on substrates that can not yet be used to grow mushrooms commercially
[0067] controlled formation of mushrooms in time and space
[0068] increased production levels
[0069] increased quality (e.g. more homogeneity in size and outgrowth)

[0070] In another embodiment, our invention may enable to improve growth of mushrooms in a commercial setting, or to allow commercial production of species that can not yet be produced, thereby creating opportunities to produce edible fungi in a cheaper way or to produce (or improve production of) pharmaceuticals or proteins that are of interest for agriculture, food, feed or non-food or non-feed applications. These proteins may either or not originate from the mushroom forming fungus. Some possible applications of a fungus of the invention are below presented.

### Method for Production

[0071] In a further aspect, there is provided a method for the production of a fungus/mushroom as identified in the previous section. The skilled person knows how to carry out such a method for instance described in Stamets and Chilton (1983) and van Griensven (1988). Such production includes colonization of a substrate (with or without a casing layer) followed by a phase where fruiting bodies are produced. The production may be carried out at a commercial scale with an optimal production level and/or quality level (more homogeneity in size and outgrowth).

[0072] The invention also relates to a method for producing a substance of interest using a fungus/mushroom of the invention. In this method, a fungus/mushroom may have been modified in order to be able to produce said substance. A substance of interest may be any substance that could be produced by a fungus/mushroom. Such substance includes a protein, a polypeptide, a metabolite. A protein or polypeptide in this context may a pharmaceutical protein or polypeptide and/or a protein or polypeptide for interest for food, feed, or non-food, non-feed applications. Such substance may be endogenous for a fungus/mushroom or not. Preferably, the method comprises the steps of: culturing of a fungus/mushroom of the invention that is able to produce a substance of interest under circumstances that are conducive for the generation of the substance of interest; and optional recovery of the substance of interest.

[0073] In an embodiment, a fungus/mushroom comprises a nucleic acid construct comprising a nucleotide encoding a protein/polypeptide to be produced. In this case, a substance of interest may be such protein/polypeptide. Alternatively, said protein/polypeptide may be involved in the production or synthesis of such substance of interest. Each feature of said nucleic acid construct has been earlier defined herein. It is also encompassed by the present invention to use a fungus/mushroom which has been further modified by increasing/decreasing the expression level of a protein/polypeptide known to be involved in the method of production of said substance.

### Method for Identification

[0074] Monitoring the expression levels of such genes or nucleotide encoding said polypeptide may allow the identification of stimuli that are involved in a method for producing a mushroom.

[0075] Therefore in a further aspect there is provided a method for identification of a stimulus capable of influencing the production of a mushroom, the method comprising the steps of:

[0076] (a) providing a fungus/mushroom;

[0077] (b) applying said stimulus to said fungus/mushroom;

[0078] (c) determining the expression level of a nucleotide sequence or the activity or steady state level of a corresponding encoded polypeptide in the fungus/mushroom of step b) wherein said polypeptide comprises or consists of an amino acid sequence that has at least 40% amino acid identity or similarity with a sequence selected from the group consisting of SEQ ID NO:1-200 or that has at least 50% amino acid identity or similarity with a sequence selected from the group consisting of SEQ ID NO: 201-208;

[0079] (d) comparing the expression, activity or steady state level determined in (c) with the expression, activity or steady state level of the nucleotide sequence or of the polypeptide in a fungus/mushroom that had not been provided said stimulus; and,

[0080] (e) identifying a stimulus that produces a difference in expression level, activity or steady state level of said nucleotide sequence or polypeptide, between the fungus/mushroom that has been provided with said stimulus and the fungus/mushroom that has not been provided said stimulus.

[0081] A stimulus may be any kind of stimulus. It may be a physical stimulus as an increase/decrease in temperature, an increase/decrease in light intensity, a change in light wave length, creating some degree of damage by e.g. light or mechanical means. It may be a substance or the presence of a dead or living organism.

[0082] In a preferred method, the expression levels, activities or steady state levels of more than one nucleotide sequence or more than one polypeptides are compared. Preferred polypeptides and encoding nucleotide sequence have already been identified herein.

[0083] In one aspect the invention also pertains to a substance, treatment or a dead or living organism that is identified in said method.

[0084] Each feature of this method has already been explained herein.

[0085] The meaning of “produces a difference in expression level, activity or steady state level of the nucleotide sequence or the polypeptide” is the same as the one of “increased expression level of a polypeptide and/or a decreased expression level of a polypeptide”.

[0086] In a further aspect, we will use a promoter-element that is responsive to (the identified) regulatory genes to:
[0087] (i) Identify (down-stream) genes that affect mushroom formation (e.g., but not limited to, the number of mushrooms, or the size of a mushroom);
[0088] (ii) Generate biological models, based on current or future commercial mushroom breeds that will allow:

[0089] A. Identification, characterization and application of specific (sets) of regulatory genes, or genes encoding structural proteins relevant for a specific species; B. Characterization and improved application of state-of-the-art modulators used for breeding mushrooms;

[0090] C. Generation or identification of derivates of state-of-the-art modulators used for breeding mushrooms with improved or new characteristics;

[0091] D. Generation or identification of novel compounds that will allow improved breeding of mushrooms, or may enable commercial breeding of mushrooms that currently can not be produced commercially.

### Sequence Identity

[0092] “Sequence identity” is herein defined as a relationship between two or more amino acid (polypeptide or protein) sequences or two or more nucleic acid (nucleotide, polynucleotide) sequences, as determined by comparing the sequences. In the art, “identity” also means the degree of sequence relatedness between amino acid or nucleic acid sequences, as the case may be, as determined by the match between strings of such sequences. “Similarity” between two amino acid sequences is determined by comparing the amino acid sequence and its conserved amino acid substitutes of one polypeptide to the sequence of a second polypeptide. “Identity” and “similarity” can be readily calculated by known methods, including but not limited to those described in (Computational Molecular Biology, Lesk, A. M., ed., Oxford University Press, New York, 1988; Biocomputing: Informatics and Genome Projects, Smith, D. W., ed., Academic Press, New York, 1993; Computer Analysis of Sequence Data, Part I, Griffin, A. M., and Griffin, H. G., eds., Humana Press, N.J., 1994; Sequence Analysis in Molecular Biology, von Heine, G., Academic Press, 1987; and Sequence Analysis Primer, Gribskov, M. and Devereux, J., eds., M Stockton Press, New York, 1991; and Carillo, H., and Lipman, D., SIAM J. Applied Math., 48:1073 (1988).

[0093] Preferred methods to determine identity are designed to give the largest match between the sequences tested. Methods to determine identity and similarity are codified in publicly available computer programs. Preferred computer program methods to determine identity and similarity between two sequences include e.g. the GCG program package (Devereux et al., 1984). BestFit, BLASTP, BLASTN, and FASTA (Altschul, et al., 1990). The BLAST X program is publicly available from NCBI and other sources (BLAST Manual, Altschul, S., et al., NCBI NLM NIH Bethesda, Md. 20894). The well-known Smith Waterman algorithm may also be used to determine identity.

[0094] Preferred parameters for polypeptide sequence comparison include the following: Algorithm: Needleman and Wunsch (1970); Comparison matrix: BLOSSUM62 from Hentikoff and Hentikoff (1992); Gap Penalty: 12; and Gap Length Penalty: 4. A program useful with these parameters is publicly available as the “Ogap” program from Genetics Computer Group, located in Madison, Wis. The aforementioned parameters are the default parameters for amino acid comparisons (along with no penalty for end gaps).

[0095] Preferred parameters for nucleic acid comparison include the following: Algorithm: Needleman and Wunsch, J. Mol. Biol. 48:443-453 (1970); Comparison matrix: matches=+10, mismatch=0; Gap Penalty: 50; Gap Length Penalty: 3. Available as the Gap program from Genetics Computer Group, located in Madison, Wis. Given above are the default parameters for nucleic acid comparisons.

[0096] Optionally, in determining the degree of amino acid similarity, the skilled person may also take into account so-called “conservative” amino acid substitutions, as will be clear to the skilled person. Conservative amino acid substitutions refer to the interchangeability of residues having similar side chains. For example, a group of amino acids having aliphatic side chains is glycine, alanine, valine, leucine, and isoleucine; a group of amino acids having aliphatic-hydroxyl side chains is serine and threonine; a group of amino acids having amide-containing side chains is asparagine and glutamine; a group of amino acids having aromatic side chains is phenylalanine, tyrosine, and tryptophan; a group of amino acids having basic side chains is lysine, arginine, and histidine; and a group of amino acids having sulphur-containing side chains is cysteine and methionine. Preferred conservative amino acids substitution groups are: valine-leucine-isoleucine, phenylalanine-tyrosine, lysine-arginine, alanine-valine, and asparagine-glutamine. Substitutional variants of the amino acid sequence disclosed herein are those in which at least one residue in the disclosed sequences has been removed and a different residue inserted in its place. Preferably, the amino acid change is conservative. Preferred conservative substitutions for each of the naturally occurring amino acids are as follows: Ala to ser; Arg to lys; Asn to gln or his; Asp to glu; Cys to ser or ala; Gln to asn; Glu to asp; Gly to pro; His to asn or gln; Ile to leu or val; Leu to ile or val; Lys to arg; gln or glu; Met to leu or ile; Phe to met, leu or tyr; Ser to thr; Thr to ser; Trp to tyr; Tyr to trp or phe; and, Val to ile or leu.

[0097] In this document and in its claims, the verb “to comprise” and its conjugations is used in its non-limiting sense to mean that items following the word are included, but items not specifically mentioned are not excluded. In addition the verb “to consist” may be replaced by “to consist essentially of” meaning that a product or a composition as defined herein may comprise additional component(s) than the ones specifically identified, said additional component(s) not altering the unique characteristic of the invention. In addition, reference to an element by the indefinite article “a” or “an” does not exclude the possibility that more than one of the element is present, unless the context clearly requires that there be one and only one of the elements. The indefinite article “a” or “an” thus usually means “at least one”.

[0098] All patent and literature references cited in the present specification are hereby incorporated by reference in their entirety.

[0099] The following examples are offered for illustrative purposes only, and are not intended to limit the scope of the present invention in any way.

### DESCRIPTION OF THE FIGURES

[0100] FIG. 1: Fruiting body formation in a wild-type dikaryon (A, D) and in dikaryons in which the fst3 (B, E) and fst4 (C, F) genes have been inactivated. D-F show a magnification of part of the colonies shown in A-C. Bar represents 5 mm (D-F).

[0101] FIG. 2: Alignment of protein sequences of WC2 of S. commune (proteinID 13988), L. bicolor (proteinID 306097) and C. cinereus (proteinID CC1G_{—}01095).

[0102] Sequence identity is indicated with an asterisk (*) and similarity with a semicolon (:) above the alignment. Alignment was made using CLUSTAL 2.0.12.

[0103] FIG. 3: Alignment of protein sequences of C2H2 of S. commune (proteinID 114363), L. bicolor (proteinID 310874) and C. cinereus (proteinID CC1G_{—}08877).

[0104] Sequence identity is indicated with an asterisk (*) and similarity with a semicolon (:) above the alignment. Alignment was made using CLUSTAL 2.0.12.

[0105] FIG. 4: Alignment of protein sequences of Fst3 of S. commune (proteinID 257422), L. bicolor (proteinID 307309) and C. cinereus (proteinID CC1G_{—}02690).

[0106] Sequence identity is indicated with an asterisk (*) and similarity with a semicolon (:) above the alignment. Alignment was made using CLUSTAL 2.0.12.

[0107] FIG. 5: Alignment of protein sequences of Fst4 of S. commune (proteinID 66861), L. bicolor (proteinID 308722) and C. cinereus (proteinID CC1G_{—}05035).

[0108] Sequence identity is indicated with an asterisk (*) and similarity with a semicolon (:) above the alignment. Alignment was made using CLUSTAL 2.0.12.

[0109] FIG. 6: Alignment of protein sequences of Gat1 of S. commune (proteinID 255004), L. bicolor (proteinID 292733) and C. cinereus (proteinID CC1G_{—}01461).

[0110] Sequence identity is indicated with an asterisk (*) and similarity with a semicolon (:) above the alignment. Alignment was made using CLUSTAL 2.0.12.

[0111] FIG. 7: Alignment of protein sequences of Hom1 of S. commune (proteinID 257652), L. bicolor (proteinID 324166) and C. cinereus (proteinID CC1G_{—}01991). Sequence identity is indicated with an asterisk (*) and similarity with a semicolon (:) above the alignment. Alignment was made using CLUSTAL 2.0.12.

[0112] FIG. 8: Alignment of protein sequences of Hom2 of S. commune (proteinID 257987), L. bicolor (proteinID 293988) and C. cinereus (proteinID CC1G_{—}01962). Sequence identity is indicated with an asterisk (*) and similarity with a semicolon (:) above the alignment. Alignment was made using CLUSTAL 2.0.12.

[0113] FIG. 9: Alignment of protein sequences of Bri1 of S. commune (proteinID 255701), L. bicolor (proteinID 300797) and C. cinereus (proteinID CC1G_{—}03649).

[0114] Sequence identity is indicated with an asterisk (*) and similarity with a semicolon (:) above the alignment. Alignment was made using CLUSTAL 2.0.12.

### EXAMPLES

### Example 1

### Identification of Putative Transcription Factors in the Genome of Schizophyllum Commune

[0115] Automatic gene calling of the genome of the Schizophyllum commune strain 4-8 (FGSC #9210) (8.29×coverage) by the Joint Genome Institute resulted in 13181 predicted genes (see http://jgi.doe.gov/Scommune). These genes were automatically annotated using GO (Gene Ontology) (Ashburner et al., 2000), KOG (euKaryotic Orthologous Groups) (Koonin et al., 2004) and PFAM algorithms (Finn et al., 2008). This automatic annotation was used as a starting point to identify transcription factors (TFs):
[0116] Based on known DNA binding domains, 190 genes were placed in the GO accession term “Transcription Factor Activity” (GO:0003700).
[0117] The KOG annotation algorithm predicted 569 genes to be generally involved in transcription (Function ID: “K”). From these, 205 transcription factors were manually identified.
[0118] A total of 151 POLYPEPTIDEs were identified based on the presence of PFAM domain PF00096/IPR007087 (Zinc finger, C2H2-type).

[0119] All putative TFs were manually inspected and gene model or annotation were adjusted when necessary. Duplicate entries in the list were removed. To identify TFs that were missed during the automatic annotation, the identified TFs were used in a BLASTp (to the database of predicted proteins) and BLASTn (to the genomic database) analysis. Resulting hits were manually inspected and newly identified TFs were added to the list. These procedures led to the identification of 472 putative TFs in the genome of S. commune.

### Expression Profile of the Putative Transcription Factors

[0120] In order to determine the expression profile of the putative TFs during fruiting body development, we used the technique MPSS (massive parallel signature sequencing). Total RNA was isolated from the monokaryotic strain 4-40 (CBS 340.81) and from the dikaryon resulting from a cross between 4-40 and 4-39 (CBS 341.81). A 7-day-old colony grown on solid MM at 30 C in the dark was homogenized in 200 ml MM using a Waring blender for 1 min at low speed. 2 ml of the homogenized mycelium was spread out over a polycarbonate membrane that was placed on top of solidified MM. Vegetative monokaryotic mycelium was grown for 4 days in the light. The dikaryon was grown for 2 and 4 days in the light to isolate mycelium with stage I aggregates and stage II primordia, respectively. Mature mushrooms of 3 days old were picked from dikaryotic cultures that had grown for 8 days in the light. RNA was isolated as described (van Peer et al., 2009). MPSS was performed essentially as described (Brenner et al., 2000) except that after DpnII digestion MmeI was used to generate 20 bp tags. Tags were sequenced using the Clonal Single Molecule Array technique (Illumina, Hayward, Calif., US). Programs were developed in the programming language Python to analyze the data. Tag counts were normalized to transcripts per million (TPM). Tags with a maximum of <4 TPM were removed from the data set. TPM values of tags originating from the same transcript were summed to assess their expression levels. If the gene of a putative TF did not contain a known 5′ or 3′ UTR, then 200 bp of genomic DNA was added to the respective end of the coding sequence of the gene. MPSS expression analysis agreed with expression studies that have been performed in the past (for a review see Wösten, H. A. B. & Wessels, 2006).

### Identification of Interesting Expression Profiles

[0121] A TF is considered to be potentially involved in regulation of fruiting body formation when it is either up or down regulated in one of the developmental stages compared to the sterile monokaryon. There are 75 TFs which were at least two fold-up regulated, and 155 at least two-fold down regulated. More interestingly, 29 of these were at least four fold up-regulated and 77 at least 4 fold down-regulated. Even more interestingly, 9 were at least ten fold up-regulated and 27 at least ten-fold down regulated.

[0122] The proteinIDs and the MPSS values of these interesting TFs are indicated in Table 1.

TABLE 1A
Transcription factor genes (first column) that are up regulated at least 2 times compared to monokaryons during some stage of
fruiting body formation. Expression of the transcription factor genes was assessed by MPSS and is expressed in tags per million.
Homologues of the transcription factors in L. bicolour and C. cinereus are indicated in the last two columns.

| ProteinID | Monokaryon light (s) | Monokaryon dark (s) | Stage I light (s) | Stage I dark (s) | Stage II light (s) | Mush-room (s) |
|---|---|---|---|---|---|---|
| 84275 | 356 | 356 | 28 | 794 | 679 | 148 |
| 112067 | 4 | 7 | 2 | 20 | 18 | 8 |
| 75142 | 23 | 25 | 96 | 46 | 46 | 26 |
| 255701 | 16 | 17 | 9 | 73 | 56 | 23 |
| 17463 | 4 | 4 | 2 | 10 | 7 | 2 |
| 80413 | 75 | 142 | 767 | 1373 | 3741 | 548 |
| 269940 | 0 | 5 | 0 | 8 | 10 | 0 |
| 103341 | 17 | 15 | 18 | 105 | 46 | 31 |
| 68168 | 42 | 53 | 12 | 102 | 224 | 80 |
| 80935 | 20 | 11 | 8 | 13 | 15 | 48 |
| 65208 | 0 | 4 | 0 | 8 | 9 | 2 |
| 269941 | 49 | 43 | 31 | 185 | 155 | 269 |
| 81364 | 29 | 16 | 11 | 28 | 16 | 62 |
| 236086 | 1 | 0 | 0 | 9 | 15 | 7 |
| 258244 | 0 | 2 | 0 | 1 | 5 | 0 |
| 233954 | 83 | 40 | 230 | 83 | 52 | 160 |
| 81115 | 0 | 0 | 5 | 1 | 0 | 3 |
| 50846 | 0 | 2 | 0 | 8 | 11 | 0 |
| 269944 | 38 | 58 | 7 | 116 | 106 | 53 |
| 11907 | 2 | 2 | 1 | 5 | 12 | 5 |
| 13988 | 19 | 10 | 18 | 34 | 32 | 42 |
| 255004 | 73 | 51 | 17 | 149 | 328 | 95 |
| 85539 | 42 | 35 | 21 | 36 | 30 | 92 |
| 83110 | 21 | 19 | 36 | 33 | 17 | 42 |
| 16376 | 10 | 18 | 35 | 42 | 28 | 49 |
| 53446 | 0 | 0 | 0 | 1 | 5 | 0 |
| 67562 | 1 | 2 | 2 | 3 | 4 | 7 |
| 54452 | 57 | 45 | 170 | 61 | 37 | 31 |
| 86194 | 21 | 18 | 1 | 73 | 50 | 4 |
| 269936 | 5 | 11 | 17 | 215 | 239 | 141 |
| 66861 | 58 | 62 | 55 | 136 | 195 | 258 |
| 255327 | 2 | 10 | 1 | 12 | 20 | 3 |
| 84267 | 43 | 46 | 11 | 102 | 85 | 46 |
| 84657 | 4 | 12 | 1 | 35 | 36 | 5 |
| 102836 | 2 | 3 | 2 | 6 | 13 | 3 |
| 102971 | 20 | 9 | 5 | 14 | 11 | 40 |
| 103145 | 39 | 9 | 159 | 33 | 23 | 45 |
| 105299 | 0 | 0 | 2 | 5 | 13 | 5 |
| 108072 | 2 | 1 | 7 | 3 | 8 | 11 |
| 269950 | 6 | 17 | 1 | 22 | 40 | 7 |
| 110010 | 8 | 7 | 3 | 9 | 7 | 19 |
| 110310 | 8 | 2 | 2 | 1 | 5 | 17 |
| 110595 | 3 | 4 | 1 | 5 | 8 | 2 |
| 269932 | 14 | 12 | 6 | 37 | 80 | 79 |
| 111234 | 49 | 43 | 46 | 135 | 61 | 32 |
| 269957 | 2 | 5 | 0 | 3 | 5 | 10 |
| 113625 | 0 | 1 | 1 | 5 | 2 | 1 |
| 114874 | 11 | 14 | 13 | 55 | 35 | 9 |
| 230844 | 20 | 15 | 12 | 20 | 46 | 15 |
| 233513 | 0 | 2 | 0 | 4 | 5 | 0 |
| 236631 | 37 | 33 | 51 | 64 | 28 | 74 |
| 255185 | 6 | 10 | 2 | 37 | 54 | 21 |
| 255490 | 16 | 17 | 2 | 21 | 52 | 14 |
| 255941 | 4 | 4 | 3 | 23 | 64 | 12 |
| 256135 | 16 | 13 | 2 | 33 | 10 | 2 |
| 257422 | 66 | 48 | 23 | 158 | 165 | 236 |
| 257652 | 64 | 105 | 39 | 540 | 282 | 541 |
| 112780 | 1 | 0 | 20 | 0 | 1 | 1 |
| 114363 | 11 | 24 | 10 | 113 | 247 | 166 |
| 103949 | 11 | 29 | 11 | 89 | 52 | 23 |
| 250177 | 3 | 8 | 0 | 16 | 12 | 3 |
| 258543 | 0 | 1 | 0 | 2 | 4 | 0 |
| 85474 | 0 | 2 | 1 | 9 | 8 | 15 |
| 11542 | 28 | 4 | 72 | 13 | 8 | 18 |
| 110354 | 4 | 9 | 1 | 26 | 29 | 7 |
| 230646 | 3 | 12 | 5 | 10 | 36 | 2 |
| 110178 | 3 | 0 | 6 | 2 | 1 | 7 |
| 237000 | 0 | 4 | 1 | 9 | 5 | 1 |
| 110445 | 5 | 5 | 14 | 11 | 17 | 1894 |
| 269975 | 13 | 57 | 5 | 169 | 140 | 37 |
| 256910 | 14 | 14 | 4 | 44 | 34 | 14 |
| 84085 | 4 | 11 | 1 | 22 | 15 | 4 |
| 104304 | 34 | 29 | 81 | 11 | 11 | 21 |
| 111555 | 1 | 1 | 9 | 36 | 50 | 9 |
| 258217 | 0 | 2 | 0 | 3 | 9 | 0 |

| ProteinID | Laccaria bicolor | Coprinus cinereus |
|---|---|---|
| 84275 | 3.51123e−028 | 1.05479e−024 (CC1G_00475.1\|Coprinus cinereus |
| | (jgi\|Lacbi1\|301245\|eu2.Lbscf0001g06940) | predicted protein (translation) (288 aa)) |
| 112067 | 2.16056e−042 | 8.29072e−040 (CC1G_09213.1\|Coprinus cinereus |
| | (jgi\|Lacbi1\|165205\|gwh1.50.46.1) | hypothetical protein (translation) (163 aa)) |
| 75142 | 1.45116e−045 | 8.20197e−022 (CC1G_06695.1\|Coprinus cinereus |
| | (jgi\|Lacbi1\|149718\|gww1.48.44.1) | hypothetical protein (translation) (71 aa)) |
| 255701 | 7.91122e−122 | 8.46417e−123 (CC1G_03649.1\|Coprinus cinereus |
| | (jgi\|Lacbi1\|300797\|eu2.Lbscf0001g02460) | hypothetical protein (translation) (804 aa)) |
| 17463 | 7.57488e−029 | 6.88671e−012 (CC1G_03947.1\|Coprinus cinereus |
| | (jgi\|Lacbi1\|311419\|eu2.Lbscf0004g03750) | hypothetical protein (translation) (433 aa)) |
| 80413 | 4.37799e−016 | 1.50246e−015 (CC1G_00158.1\|Coprinus cinereus |
| | (jgi\|Lacbi1\|307632\|eu2.Lbscf0036g00800) | predicted protein (translation) (207 aa)) |
| 269940 | 1.32211e−040 | 4.43575e−036 (CC1G_01926.1\|Coprinus cinereus |
| | (jgi\|Lacbi1\|298063\|eu2.Lbscf0013g01370) | predicted protein (translation) (594 aa)) |
| 103341 | 2.56311e−110 | 8.69424e−108 (CC1G_08208.1\|Coprinus cinereus |
| | (jgi\|Lacbi1\|303733\|eu2.Lbscf0025g00680) | hypothetical protein (translation) (750 aa)) |
| 68168 | 1.39087e−047 | 3.83544e−048 (CC1G_11894.1\|Coprinus cinereus |
| | (jgi\|Lacbi1\|296675\|eu2.Lbscf0010g04840) | hypothetical protein (translation) (392 aa)) |
| 80935 | 6.82767e−162 | 2.38275e−161 (CC1G_11233.1\|Coprinus cinereus |
| | (jgi\|Lacbi1\|181470\|estExt_GeneWisePlus_human. | hypothetical protein (translation) (1884 aa)) |
| | C_10729) | |
| 65208 | 8.54145e−080 | 9.87732e−070 (CC1G_08279.1\|Coprinus cinereus |
| | (jgi\|Lacbi1\|300068\|eu2.Lbscf0018g01550) | hypothetical protein (translation) (947 aa)) |
| 269941 | 2.36211e−049 | 3.76822e−021 (CC1G_10208.1\|Coprinus cinereus |
| | (jgi\|Lacbi1\|150048\|gww1.2.776.1) | hypothetical protein (translation) (658 aa)) |
| 81364 | 7.0499e−024 | 2.26843e−015 (CC1G_10373.1\|Coprinus cinereus |
| | (jgi\|Lacbi1\|302141\|eu2.Lbscf0020g00560) | predicted protein (translation) (473 aa)) |
| 236086 | 3.49156e−039 | 1.24586e−029 (CC1G_09355.1\|Coprinus cinereus |
| | (jgi\|Lacbi1\|296378\|eu2.Lbscf0010g01870) | predicted protein (translation) (493 aa)) |
| 258244 | 7.71139e−017 | 1.17097e−018 (CC1G_13487.1\|Coprinus cinereus |
| | (jgi\|Lacbi1\|299352\|eu2.Lbscf0016g01460) | hypothetical protein (translation) (421 aa)) |
| 233954 | 5.4199 | 5.96533e−005 (CC1G_13389.1\|Coprinus cinereus |
| | (jgi\|Lacbi1\|293338\|estExt_fgenesh2_pg.C_60273) | predicted protein (translation) (358 aa)) |
| 81115 | 0.0 | 0.0 (CC1G_10583.1\|Coprinus cinereus hypothetical |
| | (jgi\|Lacbi1\|307431\|eu2.Lbscf0035g00900) | protein (translation) (1281 aa)) |
| 50846 | 6.36781e−097 | 4.90667e−098 (CC1G_12965.1\|Coprinus cinereus |
| | (jgi\|Lacbi1\|161020\|gwh1.2.487.1) | hypothetical protein (translation) (379 aa)) |
| 269944 | 5.19099e−020 | 1.15336e−014 (CC1G_06364.1\|Coprinus cinereus |
| | (jgi\|Lacbi1\|297310\|eu2.Lbscf0011g04670) | predicted protein (translation) (1332 aa)) |
| 11907 | 1.20451e−031 | 5.5527e−016 (CC1G_01569.1\|Coprinus cinereus |
| | (jgi\|Lacbi1\|227966\|e_gwh1.1.1408.1) | hypothetical protein (translation) (878 aa)) |
| 13988 | 4.82221e−058 | 1.32299e−023 (CC1G_01095.1\|Coprinus cinereus |
| | (jgi\|Lacbi1\|306097\|eu2.Lbscf0002g11550) | hypothetical protein (translation) (249 aa)) |
| 255004 | 1.75263e−038 | 1.13601e−033 (CC1G_01461.1\|Coprinus cinereus |
| | (jgi\|Lacbi1\|292733\|estExt_fgenesh2_pg.C_40260) | hypothetical protein (translation) (568 aa)) |
| 85539 | No Hit | 3.09688 (CC1G_06401.1\|Coprinus cinereus |
| | | predicted protein (translation) (274 aa)) |
| 83110 | No Hit | 9.01414 (CC1G_05428.1\|Coprinus cinereus |
| | | predicted protein (translation) (819 aa)) |
| 16376 | 4.29556e−008 | 4.57134e−015 (CC1G_11831.1\|Coprinus cinereus |
| | (jgi\|Lacbi1\|296276\|eu2.Lbscf0010g00850) | predicted protein (translation) (230 aa)) |
| 53446 | 4.91911e−127 | 4.92489e−101 (CC1G_04979.1\|Coprinus cinereus |
| | (jgi\|Lacbi1\|309166\|eu2.Lbscf0003g08050) | predicted protein (translation) (927 aa)) |
| 67562 | 2.09205e−113 | 0.0 (CC1G_00774.1\|Coprinus cinereus hypothetical |
| | (jgi\|Lacbi1\|244290\|e_gww1.2.539.1) | protein (translation) (937 aa)) |
| 54452 | 2.56697e−016 | 3.47804e−015 (CC1G_00943.1\|Coprinus cinereus |
| | (jgi\|Lacbi1\|305501\|eu2.Lbscf0002g05590) | predicted protein (translation) (76 aa)) |
| 86194 | 2.45579e−025 | 2.79927e−031 (CC1G_08665.1\|Coprinus cinereus |
| | (jgi\|Lacbi1\|247901\|e_gww1.7.313.1) | hypothetical protein (translation) (632 aa)) |
| 269936 | 1.90329e−165 | 1.006e−155 (CC1G_11764.1\|Coprinus cinereus |
| | (jgi\|Lacbi1\|230018\|e_gwh1.2.213.1) | hypothetical protein (translation) (684 aa)) |
| 66861 | 0.0 | 1.3136e−162 (CC1G_05035.1\|Coprinus cinereus |
| | (jgi\|Lacbi1\|308722\|eu2.Lbscf0003g03610) | predicted protein (translation) (743 aa)) |
| 255327 | 5.60605e−005 | 1.50915e−080 (CC1G_00489.1\|Coprinus cinereus |
| | (jgi\|Lacbi1\|255877\|e_gww1.68.5.1) | hypothetical protein (translation) (874 aa)) |
| 84267 | 6.77968e−054 | 9.86192e−019 (CC1G_00539.1\|Coprinus cinereus |
| | (jgi\|Lacbi1\|301338\|eu2.Lbscf0001g07870) | predicted protein (translation) (203 aa)) |
| 84657 | 1.34045e−080 | 2.71068e−039 (CC1G_09309.1\|Coprinus cinereus |
| | (jgi\|Lacbi1\|293353\|estExt_fgenesh2_pg.C_60305) | predicted protein (translation) (553 aa)) |
| 102836 | 0.00197812 | 0.0384765 (CC1G_09335.1\|Coprinus cinereus |
| | (jgi\|Lacbi1\|310368\|eu2.Lbscf0045g00870) | hypothetical protein (translation) (761 aa)) |
| 102971 | 1.20314e−114 | 9.33746e−095 (CC1G_01274.1\|Coprinus cinereus |
| | (jgi\|Lacbi1\|305200\|eu2.Lbscf0002g02580) | hypothetical protein (translation) (503 aa)) |
| 103145 | 1.13092e−017 | 2.79273 (CC1G_06961.1\|Coprinus cinereus |
| | (jgi\|Lacbi1\|163053\|gwh1.2.659.1) | hypothetical protein similar to b-glucan synthase |
| | | (translation) (1778 aa)) |
| 105299 | 1.91552e−124 | 4.89067e−121 (CC1G_05112.1\|Coprinus cinereus |
| | (jgi\|Lacbi1\|293478\|estExt_fgenesh2_pg.C_60495) | predicted protein (translation) (856 aa)) |
| 108072 | 0.000119896 | 0.00172153 (CC1G_04096.1\|Coprinus cinereus |
| | (jgi\|Lacbi1\|305624\|eu2.Lbscf0002g06820) | predicted protein (translation) (846 aa)) |
| 269950 | 4.75256e−040 | 2.63605e−025 (CC1G_12565.1\|Coprinus cinereus |
| | (jgi\|Lacbi1\|297262\|eu2.Lbscf0011g04190) | hypothetical protein (translation) (1114 aa)) |
| 110010 | 1.02481e−134 | 5.44366e−097 (CC1G_09476.1\|Coprinus cinereus |
| | (jgi\|Lacbi1\|254611\|e_gww1.48.60.1) | hypothetical protein (translation) (495 aa)) |
| 110310 | 8.89088e−067 | 6.27856e−058 (CC1G_00878.1\|Coprinus cinereus |
| | (jgi\|Lacbi1\|298403\|eu2.Lbscf0014g00160) | hypothetical protein (translation) (632 aa)) |
| 110595 | 5.00291e−006 | 4.42266e−006 (CC1G_05683.1\|Coprinus cinereus |
| | (jgi\|Lacbi1\|292128\|estExt_fgenesh2_pg.C_20415) | predicted protein (translation) (900 aa)) |
| 269932 | 2.4932e−022 | 9.12302e−015 (CC1G_00448.1\|Coprinus cinereus |
| | (jgi\|Lacbi1\|311840\|eu2.Lbscf0004g07960) | predicted protein (translation) (853 aa)) |
| 111234 | 1.14196e−068 | 1.11396e−038 (CC1G_01352.1\|Coprinus cinereus |
| | (jgi\|Lacbi1\|330180\|fgenesh3_pg.C_scaffold_25000163) | predicted protein (translation) (537 aa)) |
| 269957 | 2.56747 | 0.208227 (CC1G_11229.1\|Coprinus cinereus |
| | (jgi\|Lacbi1\|327452\|fgenesh3_pg.C_scaffold_12000342) | hypothetical protein similar to RNA polymerase II |
| | | largest subunit (translation) (1643 aa)) |
| 113625 | 5.11144e−017 | 2.91369e−020 (CC1G_03384.1\|Coprinus cinereus |
| | (jgi\|Lacbi1\|324266\|fgenesh3_pg.C_scaffold_5000373) | predicted protein (translation) (472 aa)) |
| 114874 | 3.11655e−015 | 2.85953e−014 (CC1G_07059.1\|Coprinus cinereus |
| | (jgi\|Lacbi1\|296989\|eu2.Lbscf0011g01460) | predicted protein (translation) (636 aa)) |
| 230844 | 3.39291e−005 | 6.53481e−100 (CC1G_01258.1\|Coprinus cinereus |
| | (jgi\|Lacbi1\|242593\|e_gww1.1.1018.1) | hypothetical protein (translation) (456 aa)) |
| 233513 | 1.90507e−008 | 1.59982e−006 (CC1G_04980.1\|Coprinus cinereus |
| | (jgi\|Lacbi1\|309166\|eu2.Lbscf0003g08050) | predicted protein (translation) (546 aa)) |
| 236631 | 1.31226e−037 | 5.4302e−029 (CC1G_08004.1\|Coprinus cinereus |
| | (jgi\|Lacbi1\|316437\|eu2.Lbscf0073g00530) | predicted protein (translation) (433 aa)) |
| 255185 | 0.0 | 0.0 (CC1G_00087.1\|Coprinus cinereus hypothetical |
| | (jgi\|Lacbi1\|292149\|estExt_fgenesh2_pg.C_20489) | protein (translation) (946 aa)) |
| 255490 | 2.13217e−043 | 2.32009e−033 (CC1G_06721.1\|Coprinus cinereus |
| | (jgi\|Lacbi1\|291485\|estExt_fgenesh2_pg.C_10083) | predicted protein (translation) (1168 aa)) |
| 255941 | 3.39452e−034 | 1.14738e−038 (CC1G_04277.1\|Coprinus cinereus |
| | (jgi\|Lacbi1\|292246\|estExt_fgenesh2_pg.C_20664) | predicted protein (translation) (444 aa)) |
| 256135 | 6.41127e−146 | 8.05896e−081 (CC1G_02690.1\|Coprinus cinereus |
| | (jgi\|Lacbi1\|305928\|eu2.Lbscf0002g09860) | hypothetical protein (translation) (801 aa)) |
| 257422 | 0.0 | 0.0 (CC1G_02690.1\|Coprinus cinereus hypothetical |
| | (jgi\|Lacbi1\|307309\|eu2.Lbscf0034g01740) | protein (translation) (801 aa)) |
| 257652 | 2.23702e−022 | 3.07303e−013 (CC1G_01991.1\|Coprinus cinereus |
| | (jgi\|Lacbi1\|324166\|fgenesh3_pg.C_scaffold_5000273) | predicted protein (translation) (269 aa)) |
| 112780 | 3.30746e−008 | 8.63879e−006 (CC1G_05981.1\|Coprinus cinereus |
| | (jgi\|Lacbi1\|312052\|eu2.Lbscf0004g10080) | predicted protein (translation) (278 aa)) |
| 114363 | 4.54998e−018 | 9.482e−011 (CC1G_02553.1\|Coprinus cinereus |
| | (jgi\|Lacbi1\|295582\|estExt_fgenesh2_pg.C_480074) | predicted protein (translation) (203 aa)) |
| 103949 | 5.98193e−020 | 8.48828e−013 (CC1G_11310.1\|Coprinus cinereus |
| | (jgi\|Lacbi1\|298392\|eu2.Lbscf0014g00050) | hypothetical protein (translation) (318 aa)) |
| 250177 | 3.40735e−081 | 3.015e−078 (CC1G_06686.1\|Coprinus cinereus |
| | (jgi\|Lacbi1\|307141\|eu2.Lbscf0034g00060) | hypothetical protein (translation) (876 aa)) |
| 258543 | 8.22696e−058 | 9.35938e−049 (CC1G_03556.1\|Coprinus cinereus |
| | (jgi\|Lacbi1\|297675\|eu2.Lbscf0012g02300) | predicted protein (translation) (932 aa)) |
| 85474 | 1.0596 | 0.00216492 (CC1G_02553.1\|Coprinus cinereus |
| | (jgi\|Lacbi1\|295582\|estExt_fgenesh2_pg.C_480074) | predicted protein (translation) (203 aa)) |
| 11542 | 4.78687e−046 | 4.28541e−046 (CC1G_03228.1\|Coprinus cinereus |
| | (jgi\|Lacbi1\|313756\|eu2.Lbscf0005g03450) | hypothetical protein (translation) (226 aa)) |
| 110354 | 1.31693e−049 | 4.87952e−040 (CC1G_04483.1\|Coprinus cinereus |
| | (jgi\|Lacbi1\|313784\|eu2.Lbscf0005g03730) | hypothetical protein (translation) (373 aa)) |
| 230646 | 0.632651 | 0.837813 (CC1G_02232.1\|Coprinus cinereus |
| | (jgi\|Lacbi1\|297378\|eu2.Lbscf0011g05350) | hypothetical protein (translation) (1133 aa)) |
| 110178 | 0.344423 | 2.44418 (CC1G_07066.1\|Coprinus cinereus |
| | (jgi\|Lacbi1\|335236\|fgenesh3_pg.C_scaffold_79000041) | hypothetical protein (translation) (858 aa)) |
| 237000 | 1.68911e−029 | 1.08788e−025 (CC1G_11340.1\|Coprinus cinereus |
| | (jgi\|Lacbi1\|293969\|estExt_fgenesh2_pg.C_90377) | predicted protein (translation) (845 aa)) |
| 110445 | 0.00110609 | 0.0455875 (CC1G_06494.1\|Coprinus cinereus |
| | (jgi\|Lacbi1\|305984\|eu2.Lbscf0002g10420) | hypothetical protein (translation) (456 aa)) |
| 269975 | 6.5175e−037 | 4.8057e−035 (CC1G_04895.1\|Coprinus cinereus |
| | (jgi\|Lacbi1\|333777\|fgenesh3_pg.C_scaffold_55000060) | hypothetical protein (translation) (1005 aa)) |
| 256910 | 0.000486722 | 5.13982e−010 (CC1G_02553.1\|Coprinus cinereus |
| | (jgi\|Lacbi1\|305505\|eu2.Lbscf0002g05630) | predicted protein (translation) (203 aa)) |
| 84085 | 2.07695e−073 | 1.7064e−051 (CC1G_04390.1\|Coprinus cinereus |
| | (jgi\|Lacbi1\|301763\|eu2.Lbscf0001g12120) | hypothetical protein (translation) (342 aa)) |
| 104304 | 6.67277e−027 | 2.56769e−026 (CC1G_08390.1\|Coprinus cinereus |
| | (jgi\|Lacbi1\|174921\|estExt_Genewise1_human. | hypothetical protein (translation) (152 aa)) |
| | C_380088) | |
| 111555 | 3.36395e−014 | 0.000545947 (CC1G_03253.1\|Coprinus cinereus |
| | (jgi\|Lacbi1\|296536\|eu2.Lbscf0010g03450) | hypothetical protein (translation) (638 aa)) |
| 258217 | 2.4074e−129 | 3.69617e−130 (CC1G_11608.1\|Coprinus cinereus |
| | (jgi\|Lacbi1\|293964\|estExt_fgenesh2_pg.C_90364) | hypothetical protein (translation) (1093 aa)) |

TABLE 1B
Transcription factor genes (first column) that are down regulated at least 2 times compared to monokaryons during some stage of
fruiting body formation. Expression of the transcription factor genes was assessed by MPSS and is expressed in tags per million.
Homoloques of the transcription factors in L. bicolor and C. cinereus are indicated in the last two columns.

| ProteinID | Monokaryon light (s) | Monokaryon dark (s) | Stage I light (s) | Stage I dark (s) | Stage II light (s) | Mushroom (s) |
|---|---|---|---|---|---|---|
| 257931 | 2 | 15 | 1 | 5 | 10 | 0 |
| 84275 | 356 | 356 | 28 | 794 | 679 | 148 |
| 269938 | 25 | 27 | 12 | 39 | 23 | 27 |
| 112067 | 4 | 7 | 2 | 20 | 18 | 8 |
| 110229 | 11 | 22 | 1 | 21 | 28 | 2 |
| 112017 | 60 | 46 | 22 | 55 | 44 | 75 |
| 110458 | 137 | 152 | 6 | 86 | 46 | 28 |
| 255386 | 8 | 15 | 3 | 11 | 7 | 10 |
| 14572 | 21 | 16 | 5 | 9 | 9 | 15 |
| 81262 | 127 | 142 | 17 | 112 | 147 | 91 |
| 269939 | 61 | 20 | 4 | 15 | 12 | 13 |
| 48318 | 11 | 18 | 6 | 22 | 16 | 3 |
| 257380 | 2 | 7 | 1 | 9 | 11 | 2 |
| 17463 | 4 | 4 | 2 | 10 | 7 | 2 |
| 112634 | 10 | 9 | 19 | 2 | 2 | 7 |
| 255183 | 16 | 19 | 20 | 31 | 20 | 3 |
| 80526 | 180 | 96 | 13 | 101 | 38 | 88 |
| 107138 | 8 | 14 | 5 | 11 | 9 | 1 |
| 236743 | 16 | 26 | 5 | 36 | 8 | 3 |
| 68168 | 42 | 53 | 12 | 102 | 224 | 80 |
| 105290 | 13 | 27 | 4 | 27 | 27 | 18 |
| 84273 | 342 | 338 | 49 | 169 | 104 | 77 |
| 254923 | 27 | 28 | 9 | 20 | 13 | 14 |
| 71685 | 158 | 312 | 16 | 192 | 128 | 46 |
| 237374 | 22 | 12 | 11 | 11 | 5 | 14 |
| 255836 | 69 | 119 | 6 | 57 | 42 | 22 |
| 255161 | 287 | 213 | 15 | 311 | 106 | 65 |
| 62967 | 6 | 3 | 0 | 2 | 2 | 4 |
| 79748 | 175 | 117 | 79 | 46 | 77 | 53 |
| 82694 | 91 | 147 | 18 | 166 | 239 | 59 |
| 112825 | 33 | 35 | 8 | 61 | 66 | 12 |
| 257915 | 256 | 224 | 7 | 156 | 170 | 31 |
| 103232 | 9 | 29 | 4 | 13 | 12 | 3 |
| 81412 | 25 | 52 | 6 | 22 | 29 | 13 |
| 269943 | 20 | 6 | 4 | 2 | 2 | 1 |
| 102719 | 2 | 4 | 1 | 1 | 1 | 0 |
| 255207 | 47 | 22 | 6 | 49 | 48 | 28 |
| 17379 | 9 | 20 | 3 | 15 | 15 | 12 |
| 73063 | 5 | 22 | 2 | 11 | 15 | 6 |
| 104375 | 5 | 9 | 1 | 7 | 9 | 5 |
| 85886 | 43 | 116 | 4 | 118 | 73 | 33 |
| 232127 | 13 | 22 | 3 | 22 | 17 | 14 |
| 257445 | 317 | 359 | 22 | 255 | 172 | 75 |
| 104344 | 6 | 16 | 0 | 4 | 2 | 0 |
| 81107 | 46 | 63 | 4 | 69 | 58 | 57 |
| 269944 | 38 | 58 | 7 | 116 | 106 | 53 |
| 255863 | 11 | 75 | 0 | 49 | 42 | 2 |
| 232771 | 13 | 10 | 16 | 5 | 4 | 11 |
| 233370 | 7 | 11 | 7 | 5 | 3 | 12 |
| 256320 | 8 | 19 | 3 | 23 | 18 | 12 |
| 109936 | 13 | 54 | 2 | 35 | 18 | 7 |
| 114988 | 37 | 47 | 17 | 33 | 24 | 21 |
| 111683 | 10 | 16 | 2 | 21 | 17 | 5 |
| 230584 | 2 | 4 | 1 | 5 | 4 | 3 |
| 232060 | 5 | 7 | 0 | 7 | 7 | 7 |
| 11907 | 2 | 2 | 1 | 5 | 12 | 5 |
| 66326 | 54 | 234 | 3 | 166 | 122 | 26 |
| 78316 | 2 | 37 | 0 | 55 | 66 | 4 |
| 86018 | 84 | 212 | 3 | 114 | 70 | 33 |
| 255004 | 73 | 51 | 17 | 149 | 328 | 95 |
| 257247 | 26 | 21 | 4 | 30 | 26 | 15 |
| 232448 | 30 | 43 | 10 | 75 | 42 | 41 |
| 232514 | 14 | 9 | 5 | 6 | 3 | 11 |
| 63699 | 75 | 588 | 5 | 351 | 224 | 48 |
| 111405 | 25 | 40 | 2 | 37 | 42 | 26 |
| 231700 | 6 | 7 | 2 | 13 | 6 | 8 |
| 256693 | 2 | 4 | 0 | 0 | 0 | 1 |
| 257455 | 16 | 20 | 1 | 18 | 14 | 14 |
| 258832 | 5 | 2 | 1 | 3 | 4 | 3 |
| 52392 | 29 | 11 | 1 | 1 | 6 | 1 |
| 257495 | 85 | 39 | 4 | 23 | 9 | 8 |
| 57298 | 9 | 7 | 1 | 7 | 5 | 7 |
| 57817 | 20 | 22 | 6 | 25 | 24 | 21 |
| 83015 | 30 | 15 | 4 | 16 | 13 | 5 |
| 269928 | 3 | 187 | 1 | 131 | 118 | 6 |
| 86194 | 21 | 18 | 1 | 73 | 50 | 4 |
| 63410 | 12 | 38 | 4 | 52 | 35 | 29 |
| 66095 | 35 | 41 | 10 | 34 | 28 | 28 |
| 66586 | 185 | 294 | 47 | 243 | 215 | 75 |
| 73210 | 181 | 89 | 34 | 137 | 72 | 228 |
| 74309 | 11 | 27 | 2 | 19 | 12 | 3 |
| 74719 | 21 | 45 | 5 | 21 | 15 | 13 |
| 77191 | 183 | 219 | 47 | 232 | 239 | 131 |
| 78089 | 24 | 39 | 1 | 22 | 16 | 12 |
| 255327 | 2 | 10 | 1 | 12 | 20 | 3 |
| 81726 | 14 | 32 | 3 | 28 | 33 | 20 |
| 81806 | 267 | 183 | 39 | 483 | 322 | 515 |
| 84267 | 43 | 46 | 11 | 102 | 85 | 46 |
| 84657 | 4 | 12 | 1 | 35 | 36 | 5 |
| 84684 | 20 | 95 | 1 | 37 | 13 | 6 |
| 269945 | 8 | 9 | 1 | 15 | 14 | 6 |
| 254988 | 5 | 21 | 2 | 37 | 37 | 7 |
| 255385 | 29 | 24 | 1 | 37 | 18 | 31 |
| 104000 | 5 | 14 | 2 | 13 | 10 | 4 |
| 269948 | 8 | 29 | 0 | 39 | 52 | 9 |
| 269949 | 16 | 4 | 2 | 26 | 18 | 20 |
| 256993 | 45 | 23 | 7 | 16 | 12 | 32 |
| 108591 | 5 | 7 | 4 | 6 | 2 | 2 |
| 109190 | 134 | 19 | 28 | 6 | 3 | 12 |
| 269950 | 6 | 17 | 1 | 22 | 40 | 7 |
| 269952 | 5 | 7 | 1 | 13 | 9 | 9 |
| 110010 | 8 | 7 | 3 | 9 | 7 | 19 |
| 110136 | 134 | 79 | 15 | 266 | 187 | 131 |
| 110310 | 8 | 2 | 2 | 1 | 5 | 17 |
| 110416 | 115 | 53 | 2 | 6 | 3 | 5 |
| 110595 | 3 | 4 | 1 | 5 | 8 | 2 |
| 269932 | 14 | 12 | 6 | 37 | 80 | 79 |
| 250298 | 16 | 6 | 10 | 3 | 2 | 9 |
| 111623 | 5 | 2 | 2 | 1 | 2 | 1 |
| 269956 | 222 | 76 | 19 | 55 | 19 | 122 |
| 269957 | 2 | 5 | 0 | 3 | 5 | 10 |
| 231698 | 10 | 4 | 0 | 3 | 2 | 1 |
| 234557 | 9 | 2 | 0 | 1 | 1 | 3 |
| 234560 | 27 | 16 | 5 | 13 | 7 | 15 |
| 255185 | 6 | 10 | 2 | 37 | 54 | 21 |
| 269958 | 140 | 95 | 8 | 64 | 61 | 19 |
| 255490 | 16 | 17 | 2 | 21 | 52 | 14 |
| 255656 | 41 | 27 | 7 | 21 | 11 | 26 |
| 255852 | 14 | 21 | 2 | 35 | 25 | 22 |
| 256135 | 16 | 13 | 2 | 33 | 10 | 2 |
| 256706 | 149 | 61 | 19 | 91 | 89 | 40 |
| 257056 | 11 | 6 | 2 | 7 | 12 | 8 |
| 257422 | 66 | 48 | 23 | 158 | 165 | 236 |
| 257622 | 103 | 91 | 23 | 130 | 85 | 93 |
| 257926 | 180 | 333 | 36 | 412 | 478 | 51 |
| 257987 | 37 | 142 | 1 | 79 | 59 | 15 |
| 269960 | 4 | 15 | 0 | 15 | 17 | 1 |
| 250177 | 3 | 8 | 0 | 16 | 12 | 3 |
| 257265 | 134 | 283 | 4 | 77 | 60 | 24 |
| 269961 | 78 | 24 | 17 | 7 | 3 | 14 |
| 248401 | 21 | 15 | 29 | 10 | 6 | 10 |
| 82883 | 11 | 9 | 3 | 8 | 4 | 16 |
| 110354 | 4 | 9 | 1 | 26 | 29 | 7 |
| 84749 | 138 | 115 | 13 | 28 | 12 | 2 |
| 110478 | 10 | 10 | 5 | 2 | 2 | 12 |
| 254870 | 9 | 41 | 2 | 18 | 13 | 15 |
| 258883 | 8 | 7 | 0 | 8 | 9 | 1 |
| 108216 | 9 | 5 | 2 | 9 | 7 | 3 |
| 269975 | 13 | 57 | 5 | 169 | 140 | 37 |
| 108605 | 16 | 6 | 1 | 10 | 4 | 3 |
| 102516 | 16 | 8 | 3 | 17 | 13 | 7 |
| 256910 | 14 | 14 | 4 | 44 | 34 | 14 |
| 256746 | 262 | 109 | 4 | 3 | 3 | 4 |
| 258642 | 48 | 30 | 5 | 22 | 11 | 21 |
| 112405 | 20 | 8 | 4 | 6 | 3 | 5 |
| 83895 | 31 | 51 | 1 | 15 | 13 | 10 |
| 84085 | 4 | 11 | 1 | 22 | 15 | 4 |
| 109596 | 6 | 48 | 2 | 76 | 22 | 8 |
| 269979 | 3 | 28 | 0 | 13 | 9 | 4 |
| 77161 | 491 | 584 | 170 | 733 | 191 | 762 |
| 233354 | 4 | 3 | 2 | 1 | 1 | 1 |
| 104304 | 34 | 29 | 81 | 11 | 11 | 21 |
| 233946 | 9 | 7 | 1 | 4 | 5 | 5 |
| 12349 | 63 | 26 | 14 | 66 | 10 | 12 |
| 250247 | 16 | 17 | 5 | 16 | 19 | 15 |

| ProteinID | Laccaria bicolor | Coprinus cinereus |
|---|---|---|
| 257931 | 1.38426e−012 | 2.11163e−015 (CC1G_03237.1\|Coprinus cinereus |
| | (jgi\|Lacbi1\|313869\|eu2.Lbscf0005g04580) | predicted protein (translation) (427 aa)) |
| 84275 | 3.51123e−028 | 1.05479e−024 (CC1G_00475.1\|Coprinus cinereus |
| | (jgi\|Lacbi1\|301245\|eu2.Lbscf0001g06940) | predicted protein (translation) (288 aa)) |
| 269938 | 1.18154e−009 | 1.56532e−010 (CC1G_02553.1\|Coprinus cinereus |
| | (jgi\|Lacbi1\|305984\|eu2.Lbscf0002g10420) | predicted protein (translation) (203 aa)) |
| 112067 | 2.16056e−042 | 8.29072e−040 (CC1G_09213.1\|Coprinus cinereus |
| | (jgi\|Lacbi1\|165205\|gwh1.50.46.1) | hypothetical protein (translation) (163 aa)) |
| 110229 | 3.72591 | 7.58724e−022 (CC1G_07415.1\|Coprinus cinereus |
| | (jgi\|Lacbi1\|293031\|estExt_fgenesh2_pg.C_50093) | hypothetical protein (translation) (319 aa)) |
| 112017 | 0.0 (jgi\|Lacbi1\|248902\|e_gww1.9.20.1) | 0.0 (CC1G_11339.1\|Coprinus cinereus hypothetical |
| | | protein (translation) (927 aa)) |
| 110458 | 0.0 | 6.14873e−173 (CC1G_01924.1\|Coprinus cinereus |
| | (jgi\|Lacbi1\|313737\|eu2.Lbscf0005g03260) | hypothetical protein (translation) (1195 aa)) |
| 255386 | 0.0 | 4.74314e−148 (CC1G_04393.1\|Coprinus cinereus |
| | (jgi\|Lacbi1\|301759\|eu2.Lbscf0001g12080) | hypothetical protein (translation) (1072 aa)) |
| 14572 | 3.66387e−074 | 9.7012e−097 (CC1G_05086.1\|Coprinus cinereus |
| | (jgi\|Lacbi1\|293468\|estExt_fgenesh2_pg.C_60477) | hypothetical protein (translation) (1212 aa)) |
| 81262 | 0.0 (jgi\|Lacbi1\|141130\|gww1.6.14.1) | 0.0 (CC1G_05143.1\|Coprinus cinereus hypothetical |
| | | protein (translation) (2340 aa)) |
| 269939 | 0.000340456 | 0.0207699 (CC1G_03679.1\|Coprinus cinereus |
| | (jgi\|Lacbi1\|300830\|eu2.Lbscf0001g02790) | predicted protein (translation) (172 aa)) |
| 48318 | 4.00071e−135 | 1.00096e−128 (CC1G_00244.1\|Coprinus cinereus |
| | (jgi\|Lacbi1\|231004\|e_gwh1.4.426.1) | hypothetical protein (translation) (290 aa)) |
| 257380 | 6.56874e−035 | 1.17834e−035 (CC1G_04758.1\|Coprinus cinereus |
| | (jgi\|Lacbi1\|294744\|estExt_fgenesh2_pg.C_200137) | predicted protein (translation) (982 aa)) |
| 17463 | 7.57488e−029 | 6.88671e−012 (CC1G_03947.1\|Coprinus cinereus |
| | (jgi\|Lacbi1\|311419\|eu2.Lbscf0004g03750) | hypothetical protein (translation) (433 aa)) |
| 112634 | 2.32919e−007 | 0.00611536 (CC1G_02682.1\|Coprinus cinereus |
| | (jgi\|Lacbi1\|303693\|eu2.Lbscf0025g00280) | predicted protein (translation) (126 aa)) |
| 255183 | 1.98491e−040 | 4.57118e−031 (CC1G_12420.1\|Coprinus cinereus |
| | (jgi\|Lacbi1\|327087\|fgenesh3_pg.C_scaffold_11000389) | predicted protein (translation) (642 aa)) |
| 80526 | 3.1483e−035 | 6.97275e−024 (CC1G_00462.1\|Coprinus cinereus |
| | (jgi\|Lacbi1\|312016\|eu2.Lbscf0004g09720) | predicted protein (translation) (486 aa)) |
| 107138 | 2.73236e−145 | 1.20794e−144 (CC1G_11705.1\|Coprinus cinereus |
| | (jgi\|Lacbi1\|309262\|eu2.Lbscf0003g09010) | hypothetical protein (translation) (788 aa)) |
| 236743 | 2.36001e−047 | 1.14005e−051 (CC1G_04606.1\|Coprinus cinereus |
| | (jgi\|Lacbi1\|298274\|eu2.Lbscf0013g03480) | predicted protein (translation) (429 aa)) |
| 68168 | 1.39087e−047 | 3.83544e−048 (CC1G_11894.1\|Coprinus cinereus |
| | (jgi\|Lacbi1\|296675\|eu2.Lbscf0010g04840) | hypothetical protein (translation) (392 aa)) |
| 105290 | No Hit | 8.40552 (CC1G_05500.1\|Coprinus cinereus |
| | | predicted protein (translation) (552 aa)) |
| 84273 | 1.45714e−024 | 4.26924e−021 (CC1G_00473.1\|Coprinus cinereus |
| | (jgi\|Lacbi1\|320903\|fgenesh3_pg.C_scaffold_1000473) | predicted protein (translation) (149 aa)) |
| 254923 | 5.60843e−042 | 4.1397e−022 (CC1G_00307.1\|Coprinus cinereus |
| | (jgi\|Lacbi1\|311793\|eu2.Lbscf0004g07490) | hypothetical protein (translation) (874 aa)) |
| 71685 | 0.0 | 0.0 (CC1G_00311.1\|Coprinus cinereus predicted |
| | (jgi\|Lacbi1\|311799\|eu2.Lbscf0004g07550) | protein (translation) (804 aa)) |
| 237374 | 3.10486e−007 | 1.76255e−007 (CC1G_07890.1\|Coprinus cinereus |
| | (jgi\|Lacbi1\|327532\|fgenesh3_pg.C_scaffold_13000055) | predicted protein (translation) (610 aa)) |
| 255836 | 5.64052e−064 | 5.42325e−060 (CC1G_10208.1\|Coprinus cinereus |
| | (jgi\|Lacbi1\|147701\|gww1.7.218.1) | hypothetical protein (translation) (658 aa)) |
| 255161 | 2.23106e−051 | 1.76778e−050 (CC1G_01262.1\|Coprinus cinereus |
| | (jgi\|Lacbi1\|311992\|eu2.Lbscf0004g09480) | hypothetical protein (translation) (436 aa)) |
| 62967 | 1.32474e−023 | 4.58036e−027 (CC1G_00316.1\|Coprinus cinereus |
| | (jgi\|Lacbi1\|311809\|eu2.Lbscf0004g07650) | predicted protein (translation) (190 aa)) |
| 79748 | 9.92764e−018 | 1.57881e−057 (CC1G_08635.1\|Coprinus cinereus |
| | (jgi\|Lacbi1\|242593\|e_gww1.1.1018.1) | hypothetical protein (translation) (549 aa)) |
| 82694 | 4.7646e−026 | 1.79347e−021 (CC1G_02249.1\|Coprinus cinereus |
| | (jgi\|Lacbi1\|293210\|estExt_fgenesh2_pg.C_50421) | predicted protein (translation) (460 aa)) |
| 112825 | 4.78753e−049 | 1.71008e−050 (CC1G_01657.1\|Coprinus cinereus |
| | (jgi\|Lacbi1\|318917\|eu2.Lbscf0009g02770) | hypothetical protein (translation) (372 aa)) |
| 257915 | 7.94765e−037 | 0.0677954 (CC1G_13487.1\|Coprinus cinereus |
| | (jgi\|Lacbi1\|294648\|estExt_fgenesh2_pg.C_180094) | hypothetical protein (translation) (421 aa)) |
| 103232 | 0.0 | 0.0 (CC1G_01322.1\|Coprinus cinereus hypothetical |
| | (jgi\|Lacbi1\|305781\|eu2.Lbscf0002g08390) | protein (translation) (3270 aa)) |
| 81412 | 0.00052408 | 1.3798 (CC1G_11549.1\|Coprinus cinereus |
| | (jgi\|Lacbi1\|301200\|eu2.Lbscf0001g06490) | hypothetical protein (translation) (413 aa)) |
| 269943 | 2.03637e−014 | 4.5042e−010 (CC1G_09698.1\|Coprinus cinereus |
| | (jgi\|Lacbi1\|318938\|eu2.Lbscf0009g02980) | predicted protein (translation) (370 aa)) |
| 102719 | 6.69498e−017 | 1.69905e−020 (CC1G_06239.1\|Coprinus cinereus |
| | (jgi\|Lacbi1\|164524\|gwh1.30.48.1) | hypothetical protein (translation) (470 aa)) |
| 255207 | 7.09912e−042 | 1.41019e−038 (CC1G_00022.1\|Coprinus cinereus |
| | (jgi\|Lacbi1\|305751\|eu2.Lbscf0002g08090) | predicted protein (translation) (777 aa)) |
| 17379 | 0.0 | 2.61612e−172 (CC1G_08756.1\|Coprinus cinereus |
| | (jgi\|Lacbi1\|318801\|eu2.Lbscf0009g01610) | predicted protein (translation) (923 aa)) |
| 73063 | 0.0 | 0.0 (CC1G_01760.1\|Coprinus cinereus hypothetical |
| | (jgi\|Lacbi1\|301025\|eu2.Lbscf0001g04740) | protein (translation) (999 aa)) |
| 104375 | 0.0 | 0.0 (CC1G_00528.1\|Coprinus cinereus hypothetical |
| | (jgi\|Lacbi1\|301359\|eu2.Lbscf0001g08080) | protein (translation) (1155 aa)) |
| 85886 | 1.11822e−113 | 2.51255e−110 (CC1G_07649.1\|Coprinus cinereus |
| | (jgi\|Lacbi1\|294384\|estExt_fgenesh2_pg.C_120202) | hypothetical protein (translation) (1828 aa)) |
| 232127 | 3.20966e−024 | 1.37253e−020 (CC1G_01030.1\|Coprinus cinereus |
| | (jgi\|Lacbi1\|307389\|eu2.Lbscf0035g00480) | predicted protein (translation) (971 aa)) |
| 257445 | 4.58631e−076 | 4.20981e−055 (CC1G_05561.1\|Coprinus cinereus |
| | (jgi\|Lacbi1\|295409\|estExt_fgenesh2_pg.C_400037) | hypothetical protein (translation) (641 aa)) |
| 104344 | 9.3631e−021 | 9.96152e−011 (CC1G_01834.1\|Coprinus cinereus |
| | (jgi\|Lacbi1\|301103\|eu2.Lbscf0001g05520) | hypothetical protein similar to a 1-2 protein |
| | | (translation) (614 aa)) |
| 81107 | 0.647628 | 0.0585053 (CC1G_12431.1\|Coprinus cinereus |
| | (jgi\|Lacbi1\|327452\|fgenesh3_pg.C_scaffold_12000342) | hypothetical protein (translation) (479 aa)) |
| 269944 | 5.19099e−020 | 1.15336e−014 (CC1G_06364.1\|Coprinus cinereus |
| | (jgi\|Lacbi1\|297310\|eu2.Lbscf0011g04670) | predicted protein (translation) (1332 aa)) |
| 255863 | 2.47285e−020 | 1.16841e−018 (CC1G_04121.1\|Coprinus cinereus |
| | (jgi\|Lacbi1\|327972\|fgenesh3_pg.C_scaffold_14000219) | hypothetical protein (translation) (434 aa)) |
| 232771 | 3.09919e−085 | 4.1061e−076 (CC1G_12018.1\|Coprinus cinereus |
| | (jgi\|Lacbi1\|306006\|eu2.Lbscf0002g10640) | predicted protein (translation) (551 aa)) |
| 233370 | 1.28465 | 1.27315 (CC1G_04251.1\|Coprinus cinereus |
| | (jgi\|Lacbi1\|319363\|fgenesh3_pm.C_scaffold_2000088) | hypothetical protein (translation) (790 aa)) |
| 256320 | 2.27359e−033 | 5.39458e−017 (CC1G_04874.1\|Coprinus cinereus |
| | (jgi\|Lacbi1\|315442\|eu2.Lbscf0006g01260) | predicted protein (translation) (541 aa)) |
| 109936 | 1.35204e−078 | 1.762e−066 (CC1G_04598.1\|Coprinus cinereus |
| | (jgi\|Lacbi1\|294487\|estExt_fgenesh2_pg.C_130174) | predicted protein (translation) (1238 aa)) |
| 114988 | 2.26887e−016 | 2.54978e−016 (CC1G_07470.1\|Coprinus cinereus |
| | (jgi\|Lacbi1\|327972\|fgenesh3_pg.C_scaffold_14000219) | predicted protein (translation) (672 aa)) |
| 111683 | 7.20095e−007 | 7.38744e−007 (CC1G_06427.1\|Coprinus cinereus |
| | (jgi\|Lacbi1\|298964\|eu2.Lbscf0015g01100) | hypothetical protein (translation) (390 aa)) |
| 230584 | 8.39844e−013 | 5.00166e−014 (CC1G_09178.1\|Coprinus cinereus |
| | (jgi\|Lacbi1\|293340\|estExt_fgenesh2_pg.C_60280) | predicted protein (translation) (213 aa)) |
| 232060 | 1.63353e−006 | 5.78542e−008 (CC1G_00255.1\|Coprinus cinereus |
| | (jgi\|Lacbi1\|311738\|eu2.Lbscf0004g06940) | predicted protein (translation) (480 aa)) |
| 11907 | 1.20451e−031 | 5.5527e−016 (CC1G_01569.1\|Coprinus cinereus |
| | (jgi\|Lacbi1\|227966\|e_gwh1.1.1408.1) | hypothetical protein (translation) (878 aa)) |
| 66326 | 5.1963e−042 | 4.54227e−039 (CC1G_01569.1\|Coprinus cinereus |
| | (jgi\|Lacbi1\|293949\|estExt_fgenesh2_pg.C_90336) | hypothetical protein (translation) (878 aa)) |
| 78316 | 2.2508e−121 | 6.95698e−097 (CC1G_09316.1\|Coprinus cinereus |
| | (jgi\|Lacbi1\|313622\|eu2.Lbscf0005g02110) | hypothetical protein (translation) (2012 aa)) |
| 86018 | 4.04465e−108 | 4.52565e−090 (CC1G_01569.1\|Coprinus cinereus |
| | (jgi\|Lacbi1\|293949\|estExt_fgenesh2_pg.C_90336) | hypothetical protein (translation) (878 aa)) |
| 255004 | 1.75263e−038 | 1.13601e−033 (CC1G_01461.1\|Coprinus cinereus |
| | (jgi\|Lacbi1\|292733\|estExt_fgenesh2_pg.C_40260) | hypothetical protein (translation) (568 aa)) |
| 257247 | 5.18591e−110 | 8.40596e−086 (CC1G_06391.1\|Coprinus cinereus |
| | (jgi\|Lacbi1\|297145\|eu2.Lbscf0011g03020) | hypothetical protein (translation) (544 aa)) |
| 232448 | 1.3602e−024 | 6.09293e−023 (CC1G_05197.1\|Coprinus cinereus |
| | (jgi\|Lacbi1\|325071\|fgenesh3_pg.C_scaffold_6000565) | hypothetical protein (translation) (220 aa)) |
| 232514 | No Hit | 9.72573 (CC1G_07424.1\|Coprinus cinereus |
| | | hypothetical protein (translation) (828 aa)) |
| 63699 | 2.15172e−056 | 1.81485e−037 (CC1G_00101.1\|Coprinus cinereus |
| | (jgi\|Lacbi1\|305681\|eu2.Lbscf0002g07390) | predicted protein (translation) (504 aa)) |
| 111405 | 2.56691e−008 | 1.81797e−010 (CC1G_01905.1\|Coprinus cinereus |
| | (jgi\|Lacbi1\|293995\|estExt_fgenesh2_pg.C_100036) | predicted protein (translation) (479 aa)) |
| 231700 | 0.73058 | 1.01715 (CC1G_01826.1\|Coprinus cinereus |
| | (jgi\|Lacbi1\|237398\|e_gwh1.25.72.1) | predicted protein (translation) (217 aa)) |
| 256693 | 9.74717 | No Hit |
| | (jgi\|Lacbi1\|310048\|eu2.Lbscf0043g00860) | |
| 257455 | 3.47293e−019 | 1.835e−018 (CC1G_06938.1\|Coprinus cinereus |
| | (jgi\|Lacbi1\|317361\|eu2.Lbscf0007g04890) | predicted protein (translation) (1514 aa)) |
| 258832 | 2.5967e−006 | 2.99814e−006 (CC1G_03237.1\|Coprinus cinereus |
| | (jgi\|Lacbi1\|313869\|eu2.Lbscf0005g04580) | predicted protein (translation) (427 aa)) |
| 52392 | 3.02104e−139 | 3.53753e−119 (CC1G_02915.1\|Coprinus cinereus |
| | (jgi\|Lacbi1\|309008\|eu2.Lbscf0003g06470) | predicted protein (translation) (730 aa)) |
| 257495 | 0.0 | 0.0 (CC1G_09834.1\|Coprinus cinereus predicted |
| | (jgi\|Lacbi1\|317073\|eu2.Lbscf0007g02010) | protein (translation) (1043 aa)) |
| 57298 | 3.19925e−023 | 1.54075e−028 (CC1G_01588.1\|Coprinus cinereus |
| | (jgi\|Lacbi1\|293198\|estExt_fgenesh2_pg.C_50395) | predicted protein (translation) (293 aa)) |
| 57817 | 2.83971e−153 | 1.57392e−008 (CC1G_05375.1\|Coprinus cinereus |
| | (jgi\|Lacbi1\|296434\|eu2.Lbscf0010g02430) | predicted protein (translation) (188 aa)) |
| 83015 | 0.0 | 0.0 (CC1G_09335.1\|Coprinus cinereus hypothetical |
| | (jgi\|Lacbi1\|313642\|eu2.Lbscf0005g02310) | protein (translation) (761 aa)) |
| 269928 | 4.24134e−074 | 4.35046e−082 (CC1G_02207.1\|Coprinus cinereus |
| | (jgi\|Lacbi1\|162920\|gwh1.36.39.1) | hypothetical protein (translation) (1068 aa)) |
| 86194 | 2.45579e−025 | 2.79927e−031 (CC1G_08665.1\|Coprinus cinereus |
| | (jgi\|Lacbi1\|247901\|e_gww1.7.313.1) | hypothetical protein (translation) (632 aa)) |
| 63410 | 0.0 | 0.0 (CC1G_00218.1\|Coprinus cinereus predicted |
| | (jgi\|Lacbi1\|311698\|eu2.Lbscf0004g06540) | protein (translation) (653 aa)) |
| 66095 | 1.3252e−166 | 1.48521e−120 (CC1G_01157.1\|Coprinus cinereus |
| | (jgi\|Lacbi1\|158182\|gwh1.2.262.1) | hypothetical protein (translation) (515 aa)) |
| 66586 | 5.64877e−028 | 5.04929e−033 (CC1G_05406.1\|Coprinus cinereus |
| | (jgi\|Lacbi1\|293242\|estExt_fgenesh2_pg.C_50565) | hypothetical protein (translation) (337 aa)) |
| 73210 | 0.0 | 0.0 (CC1G_06540.1\|Coprinus cinereus predicted |
| | (jgi\|Lacbi1\|301157\|eu2.Lbscf0001g06060) | protein (translation) (813 aa)) |
| 74309 | 4.04216e−160 | 2.70609e−057 (CC1G_05174.1\|Coprinus cinereus |
| | (jgi\|Lacbi1\|316098\|eu2.Lbscf0006g07820) | hypothetical protein (translation) (449 aa)) |
| 74719 | 0.0 | 0.0 (CC1G_01048.1\|Coprinus cinereus hypothetical |
| | (jgi\|Lacbi1\|305811\|eu2.Lbscf0002g08690) | protein (translation) (1017 aa)) |
| 77191 | 2.11426e−048 | 8.95851e−044 (CC1G_01665.1\|Coprinus cinereus |
| | (jgi\|Lacbi1\|144806\|gww1.1.428.1) | hypothetical protein (translation) (460 aa)) |
| 78089 | 3.02159e−142 | 4.92773e−124 (CC1G_09309.1\|Coprinus cinereus |
| | (jgi\|Lacbi1\|313614\|eu2.Lbscf0005g02030) | predicted protein (translation) (553 aa)) |
| 255327 | 5.60605e−005 | 1.50915e−080 (CC1G_00489.1\|Coprinus cinereus |
| | (jgi\|Lacbi1\|255877\|e_gww1.68.5.1) | hypothetical protein (translation) (874 aa)) |
| 81726 | 0.0 | 0.0 (CC1G_02934.1\|Coprinus cinereus hypothetical |
| | (jgi\|Lacbi1\|309255\|eu2.Lbscf0003g08940) | protein (translation) (703 aa)) |
| 81806 | 1.51176e−061 | 4.60296e−072 (CC1G_08004.1\|Coprinus cinereus |
| | (jgi\|Lacbi1\|312043\|eu2.Lbscf0004g09990) | predicted protein (translation) (433 aa)) |
| 84267 | 6.77968e−054 | 9.86192e−019 (CC1G_00539.1\|Coprinus cinereus |
| | (jgi\|Lacbi1\|301338\|eu2.Lbscf0001g07870) | predicted protein (translation) (203 aa)) |
| 84657 | 1.34045e−080 | 2.71068e−039 (CC1G_09309.1\|Coprinus cinereus |
| | (jgi\|Lacbi1\|293353\|estExt_fgenesh2_pg.C_60305) | predicted protein (translation) (553 aa)) |
| 84684 | 3.11314e−009 | 9.49477e−009 (CC1G_01752.1\|Coprinus cinereus |
| | (jgi\|Lacbi1\|301023\|eu2.Lbscf0001g04720) | predicted protein (translation) (176 aa)) |
| 269945 | 0.558256 | 8.39053e−005 (CC1G_04998.1\|Coprinus cinereus |
| | (jgi\|Lacbi1\|297319\|eu2.Lbscf0011g04760) | predicted protein (translation) (540 aa)) |
| 254988 | 0.0 | 7.68764e−091 (CC1G_00348.1\|Coprinus cinereus |
| | (jgi\|Lacbi1\|311840\|eu2.Lbscf0004g07960) | hypothetical protein (translation) (727 aa)) |
| 255385 | 6.12672e−005 | 1.35469e−005 (CC1G_09834.1\|Coprinus cinereus |
| | (jgi\|Lacbi1\|317073\|eu2.Lbscf0007g02010) | predicted protein (translation) (1043 aa)) |
| 104000 | 7.64306e−036 | 4.79579e−029 (CC1G_06539.1\|Coprinus cinereus |
| | (jgi\|Lacbi1\|301156\|eu2.Lbscf0001g06050) | hypothetical protein (translation) (408 aa)) |
| 269948 | 1.45195e−130 | 1.67247e−052 (CC1G_11570.1\|Coprinus cinereus |
| | (jgi\|Lacbi1\|305537\|eu2.Lbscf0002g05950) | hypothetical protein (translation) (349 aa)) |
| 269949 | 0.0 | 0.0 (CC1G_09022.1\|Coprinus cinereus predicted |
| | (jgi\|Lacbi1\|302769\|eu2.Lbscf0022g00590) | protein (translation) (850 aa)) |
| 256993 | 2.07879e−014 | 6.92699e−008 (CC1G_01056.1\|Coprinus cinereus |
| | (jgi\|Lacbi1\|307391\|eu2.Lbscf0035g00500) | hypothetical protein (translation) (848 aa)) |
| 108591 | 0.0253515 | 0.0887384 (CC1G_06409.1\|Coprinus cinereus |
| | (jgi\|Lacbi1\|309226\|eu2.Lbscf0003g08650) | hypothetical protein (translation) (962 aa)) |
| 109190 | 2.72907e−094 | 1.3879e−073 (CC1G_02275.1\|Coprinus cinereus |
| | (jgi\|Lacbi1\|315220\|eu2.Lbscf0069g00020) | hypothetical protein (translation) (960 aa)) |
| 269950 | 4.75256e−040 | 2.63605e−025 (CC1G_12565.1\|Coprinus cinereus |
| | (jgi\|Lacbi1\|297262\|eu2.Lbscf0011g04190) | hypothetical protein (translation) (1114 aa)) |
| 269952 | 2.91537e−009 | 1.36788e−007 (CC1G_06668.1\|Coprinus cinereus |
| | (jgi\|Lacbi1\|296436\|eu2.Lbscf0010g02450) | hypothetical protein (translation) (648 aa)) |
| 110010 | 1.02481e−134 | 5.44366e−097 (CC1G_09476.1\|Coprinus cinereus |
| | (jgi\|Lacbi1\|254611\|e_gww1.48.60.1) | hypothetical protein (translation) (495 aa)) |
| 110136 | 2.67901e−009 | 1.42573e−016 (CC1G_07536.1\|Coprinus cinereus |
| | (jgi\|Lacbi1\|310623\|eu2.Lbscf0047g00510) | predicted protein (translation) (262 aa)) |
| 110310 | 8.89088e−067 | 6.27856e−058 (CC1G_00878.1\|Coprinus cinereus |
| | (jgi\|Lacbi1\|298403\|eu2.Lbscf0014g00160) | hypothetical protein (translation) (632 aa)) |
| 110416 | 3.57277e−013 | 0.000851334 (CC1G_11170.1\|Coprinus cinereus |
| | (jgi\|Lacbi1\|313811\|eu2.Lbscf0005g04000) | hypothetical protein (translation) (429 aa)) |
| 110595 | 5.00291e−006 | 4.42266e−006 (CC1G_05683.1\|Coprinus cinereus |
| | (jgi\|Lacbi1\|292128\|estExt_fgenesh2_pg.C_20415) | predicted protein (translation) (900 aa)) |
| 269932 | 2.4932e−022 | 9.12302e−015 (CC1G_00448.1\|Coprinus cinereus |
| | (jgi\|Lacbi1\|311840\|eu2.Lbscf0004g07960) | predicted protein (translation) (853 aa)) |
| 250298 | 0.0246277 | 0.0265601 (CC1G_06409.1\|Coprinus cinereus |
| | (jgi\|Lacbi1\|324266\|fgenesh3_pg.C_scaffold_5000373) | hypothetical protein (translation) (962 aa)) |
| 111623 | 0.0353287 | 0.0118479 (CC1G_02934.1\|Coprinus cinereus |
| | (jgi\|Lacbi1\|309226\|eu2.Lbscf0003g08650) | hypothetical protein (translation) (703 aa)) |
| 269956 | 2.71131e−047 | 9.94127e−007 (CC1G_00937.1\|Coprinus cinereus |
| | (jgi\|Lacbi1\|299004\|eu2.Lbscf0015g01500) | hypothetical protein (translation) (473 aa)) |
| 269957 | 2.56747 | 0.208227 (CC1G_11229.1\|Coprinus cinereus |
| | (jgi\|Lacbi1\|327452\|fgenesh3_pg.C_scaffold_12000342) | hypothetical protein similar to RNA polymerase II |
| | | largest subunit (translation) (1643 aa)) |
| 231698 | 2.12687e−008 | 0.00144182 (CC1G_01833.1\|Coprinus cinereus |
| | (jgi\|Lacbi1\|243459\|e_gww1.1.1010.1) | hypothetical protein (translation) (449 aa)) |
| 234557 | 0.019675 | 0.0217871 (CC1G_06409.1\|Coprinus cinereus |
| | (jgi\|Lacbi1\|254568\|e_gww1.48.59.1) | hypothetical protein (translation) (962 aa)) |
| 234560 | 0.0290787 | 0.106428 (CC1G_09318.1\|Coprinus cinereus |
| | (jgi\|Lacbi1\|311707\|eu2.Lbscf0004g06630) | predicted protein (translation) (411 aa)) |
| 255185 | 0.0 | 0.0 (CC1G_00087.1\|Coprinus cinereus hypothetical |
| | (jgi\|Lacbi1\|292149\|estExt_fgenesh2_pg.C_20489) | protein (translation) (946 aa)) |
| 269958 | 9.22881e−032 | 2.43397e−026 (CC1G_06624.1\|Coprinus cinereus |
| | (jgi\|Lacbi1\|320896\|fgenesh3_pg.C_scaffold_1000466) | predicted protein (translation) (615 aa)) |
| 255490 | 2.13217e−043 | 2.32009e−033 (CC1G_06721.1\|Coprinus cinereus |
| | (jgi\|Lacbi1\|291485\|estExt_fgenesh2_pg.C_10083) | predicted protein (translation) (1168 aa)) |
| 255656 | 5.05368e−116 | 5.01661e−093 (CC1G_02275.1\|Coprinus cinereus |
| | (jgi\|Lacbi1\|307141\|eu2.Lbscf0034g00060) | hypothetical protein (translation) (960 aa)) |
| 255852 | 0.0 | 0.0 (CC1G_01056.1\|Coprinus cinereus hypothetical |
| | (jgi\|Lacbi1\|307391\|eu2.Lbscf0035g00500) | protein (translation) (848 aa)) |
| 256135 | 6.41127e−146 | 8.05896e−081 (CC1G_02690.1\|Coprinus cinereus |
| | (jgi\|Lacbi1\|305928\|eu2.Lbscf0002g09860) | hypothetical protein (translation) (801 aa)) |
| 256706 | 1.54206e−024 | 9.4943e−025 (CC1G_08430.1\|Coprinus cinereus |
| | (jgi\|Lacbi1\|295375\|estExt_fgenesh2_pg.C_380074) | predicted protein (translation) (551 aa)) |
| 257056 | 8.35596e−125 | 5.37092e−068 (CC1G_07060.1\|Coprinus cinereus |
| | (jgi\|Lacbi1\|296988\|eu2.Lbscf0011g01450) | hypothetical protein (translation) (662 aa)) |
| 257422 | 0.0 | 0.0 (CC1G_02690.1\|Coprinus cinereus hypothetical |
| | (jgi\|Lacbi1\|307309\|eu2.Lbscf0034g01740) | protein (translation) (801 aa)) |
| 257622 | 8.27689e−140 | 9.46138e−139 (CC1G_03210.1\|Coprinus cinereus |
| | (jgi\|Lacbi1\|313780\|eu2.Lbscf0005g03690) | hypothetical protein (translation) (542 aa)) |
| 257926 | 5.27989e−010 | 8.2724e−009 (CC1G_09318.1\|Coprinus cinereus |
| | (jgi\|Lacbi1\|304198\|eu2.Lbscf0271g00010) | predicted protein (translation) (411 aa)) |
| 257987 | 3.52426e−038 | 1.82065e−018 (CC1G_01962.1\|Coprinus cinereus |
| | (jgi\|Lacbi1\|293988\|estExt_fgenesh2_pg.C_100022) | predicted protein (translation) (560 aa)) |
| 269960 | 1.24493e−036 | 8.86947e−028 (CC1G_05468.1\|Coprinus cinereus |
| | (jgi\|Lacbi1\|294583\|estExt_fgenesh2_pg.C_160148) | hypothetical protein (translation) (1311 aa)) |
| 250177 | 3.40735e−081 | 3.015e−078 (CC1G_06686.1\|Coprinus cinereus |
| | (jgi\|Lacbi1\|307141\|eu2.Lbscf0034g00060) | hypothetical protein (translation) (876 aa)) |
| 257265 | 6.99718e−008 | 1.62257e−006 (CC1G_07030.1\|Coprinus cinereus |
| | (jgi\|Lacbi1\|298964\|eu2.Lbscf0015g01100) | predicted protein (translation) (468 aa)) |
| 269961 | 0.0309308 | 2.19663 (CC1G_03809.1\|Coprinus cinereus |
| | (jgi\|Lacbi1\|311738\|eu2.Lbscf0004g06940) | hypothetical protein (translation) (2341 aa)) |
| 248401 | 0.000176154 | 2.31883e−005 (CC1G_12125.1\|Coprinus cinereus |
| | (jgi\|Lacbi1\|318427\|eu2.Lbscf0090g00220) | predicted protein (translation) (575 aa)) |
| 82883 | 2.13804e−008 | 6.40863e−017 (CC1G_02553.1\|Coprinus cinereus |
| | (jgi\|Lacbi1\|305505\|eu2.Lbscf0002g05630) | predicted protein (translation) (203 aa)) |
| 110354 | 1.31693e−049 | 4.87952e−040 (CC1G_04483.1\|Coprinus cinereus |
| | (jgi\|Lacbi1\|313784\|eu2.Lbscf0005g03730) | hypothetical protein (translation) (373 aa)) |
| 84749 | 1.54768e−012 | 0.00102858 (CC1G_04483.1\|Coprinus cinereus |
| | (jgi\|Lacbi1\|296536\|eu2.Lbscf0010g03450) | hypothetical protein (translation) (373 aa)) |
| 110478 | 3.08918e−006 | 6.85377e−012 (CC1G_02553.1\|Coprinus cinereus |
| | (jgi\|Lacbi1\|295582\|estExt_fgenesh2_pg.C_480074) | predicted protein (translation) (203 aa)) |
| 254870 | 4.85676e−019 | 5.50242e−009 (CC1G_13435.1\|Coprinus cinereus |
| | (jgi\|Lacbi1\|294684\|estExt_fgenesh2_pg.C_190064) | predicted protein (translation) (477 aa)) |
| 258883 | 6.57999e−035 | 2.04345e−039 (CC1G_00671.1\|Coprinus cinereus |
| | (jgi\|Lacbi1\|301563\|eu2.Lbscf0001g10120) | hypothetical protein (translation) (594 aa)) |
| 108216 | 1.77166e−005 | 0.000296472 (CC1G_09111.1\|Coprinus cinereus |
| | (jgi\|Lacbi1\|297378\|eu2.Lbscf0011g05350) | hypothetical protein (translation) (549 aa)) |
| 269975 | 6.5175e−037 | 4.8057e−035 (CC1G_04895.1\|Coprinus cinereus |
| | (jgi\|Lacbi1\|333777\|fgenesh3_pg.C_scaffold_55000060) | hypothetical protein (translation) (1005 aa)) |
| 108605 | 0.000123481 | 0.000230165 (CC1G_00937.1\|Coprinus cinereus |
| | (jgi\|Lacbi1\|150072\|gww1.21.88.1) | hypothetical protein (translation) (473 aa)) |
| 102516 | 1.238e−005 | 1.02461 (CC1G_01048.1\|Coprinus cinereus |
| | (jgi\|Lacbi1\|311605\|eu2.Lbscf0004g05610) | hypothetical protein (translation) (1017 aa)) |
| 256910 | 0.000486722 | 5.13982e−010 (CC1G_02553.1\|Coprinus cinereus |
| | (jgi\|Lacbi1\|305505\|eu2.Lbscf0002g05630) | predicted protein (translation) (203 aa)) |
| 256746 | 0.012 | 0.0235741 (CC1G_00609.1\|Coprinus cinereus |
| | (jgi\|Lacbi1\|305505\|eu2.Lbscf0002g05630) | hypothetical protein (translation) (294 aa)) |
| 258642 | 0.137871 | 0.00187319 (CC1G_11643.1\|Coprinus cinereus |
| | (jgi\|Lacbi1\|301087\|eu2.Lbscf0001g05360) | predicted protein (translation) (361 aa)) |
| 112405 | 0.00325358 | 0.00251037 (CC1G_06477.1\|Coprinus cinereus |
| | (jgi\|Lacbi1\|144261\|gww1.5.220.1) | predicted protein (translation) (257 aa)) |
| 83895 | 9.3958e−012 | 1.69333e−016 (CC1G_01345.1\|Coprinus cinereus |
| | (jgi\|Lacbi1\|305984\|eu2.Lbscf0002g10420) | predicted protein (translation) (468 aa)) |
| 84085 | 2.07695e−073 | 1.7064e−051 (CC1G_04390.1\|Coprinus cinereus |
| | (jgi\|Lacbi1\|301763\|eu2.Lbscf0001g12120) | hypothetical protein (translation) (342 aa)) |
| 109596 | 1.55855e−022 | 0.00342346 (CC1G_03235.1\|Coprinus cinereus |
| | (jgi\|Lacbi1\|296536\|eu2.Lbscf0010g03450) | predicted protein (translation) (254 aa)) |
| 269979 | 4.39042e−035 | 5.28352e−029 (CC1G_10841.1\|Coprinus cinereus |
| | (jgi\|Lacbi1\|293360\|estExt_fgenesh2_pg.C_60316) | predicted protein (translation) (798 aa)) |
| 77161 | 6.13943e−061 | 6.14124e−024 (CC1G_00609.1\|Coprinus cinereus |
| | (jgi\|Lacbi1\|301873\|eu2.Lbscf0001g13220) | hypothetical protein (translation) (294 aa)) |
| 233354 | 7.38778e−011 | 0.00482856 (CC1G_04483.1\|Coprinus cinereus |
| | (jgi\|Lacbi1\|296536\|eu2.Lbscf0010g03450) | hypothetical protein (translation) (373 aa)) |
| 104304 | 6.67277e−027 | 2.56769e−026 (CC1G_08390.1\|Coprinus cinereus |
| | (jgi\|Lacbi1\|174921\|estExt_Genewise1_human. | hypothetical protein (translation) (152 aa)) |
| | C_380088) | |
| 233946 | 2.70722e−007 | 1.06564e−006 (CC1G_09111.1\|Coprinus cinereus |
| | (jgi\|Lacbi1\|150072\|gww1.21.88.1) | hypothetical protein (translation) (549 aa)) |
| 12349 | 6.07215e−025 | 1.98713e−013 (CC1G_00609.1\|Coprinus cinereus |
| | (jgi\|Lacbi1\|301873\|eu2.Lbscf0001g13220) | hypothetical protein (translation) (294 aa)) |
| 250247 | 0.0443209 | 0.0554149 (CC1G_03253.1\|Coprinus cinereus |
| | (jgi\|Lacbi1\|299004\|eu2.Lbscf0015g01500) | hypothetical protein (translation) (638 aa)) |

TABLE 1C
Transcription factor genes (first column) that are up regulated at least 4 times compared to monokaryons during some stage of fruiting
body formation. Expression of the transcription factor genes was assessed by MPSS and is expressed in tags per million. Homoloques of the
transcription factors in L. bicolour and C. cinereus are indicated in the last two columns.

| | Monokaryon | Monokaryon | Stage | | | | | |
|---|---|---|---|---|---|---|---|---|
| ProteinID | light (s) | dark (s) | I light (s) | Stage I dark (s) | Stage II light (s) | Mushroom (s) | Laccaria bicolor | Coprinus cinereus |
| 255701 | 16 | 17 | 9 | 73 | 56 | 23 | 7.91122e−122 | 8.46417e−123 (CC1G_03649.1 \| Coprinus cinereus |
| | | | | | | | (jgi\|Lacbi1\|300797\|eu2.Lbscf0001g02460) | hypothetical protein (translation) (804 aa)) |
| 80413 | 75 | 142 | 767 | 1373 | 3741 | 548 | 4.37799e−016 | 1.50246e−015 (CC1G_00158.1 \| Coprinus cinereus |
| | | | | | | | (jgi\|Lacbi1\|307632\|eu2.Lbscf0036g00800) | predicted protein (translation) (207 aa)) |
| 103341 | 17 | 15 | 18 | 105 | 46 | 31 | 2.56311e−110 | 8.69424e−108 (CC1G_08208.1 \| Coprinus cinereus |
| | | | | | | | (jgi\|Lacbi1\|303733\|eu2.Lbscf0025g00680) | hypothetical protein (translation) (750 aa)) |
| 68168 | 42 | 53 | 12 | 102 | 224 | 80 | 1.39087e−047 | 3.83544e−048 (CC1G_11894.1 \| Coprinus cinereus |
| | | | | | | | (jgi\|Lacbi1\|296675\|eu2.Lbscf0010g04840) | hypothetical protein (translation) (392 aa)) |
| 269941 | 49 | 43 | 31 | 185 | 155 | 269 | 2.36211e−049 | 3.76822e−021 (CC1G_10208.1 \| Coprinus cinereus |
| | | | | | | | (jgi\|Lacbi1\|150048\|gww1.2.776.1) | hypothetical protein (translation) (658 aa)) |
| 236086 | 1 | 0 | 0 | 9 | 15 | 7 | 3.49156e−039 | 1.24586e−029 (CC1G_09355.1 \| Coprinus cinereus |
| | | | | | | | (jgi\|Lacbi1\|296378\|eu2.Lbscf0010g01870) | predicted protein (translation) (493 aa)) |
| 81115 | 0 | 0 | 5 | 1 | 0 | 3 | 0.0 | 0.0 (CC1G_10583.1 \| Coprinus cinereus hypothetical |
| | | | | | | | (jgi\|Lacbi1\|307431\|eu2.Lbscf0035g00900) | protein (translation) (1281 aa)) |
| 50846 | 0 | 2 | 0 | 8 | 11 | 0 | 6.36781e−097 | 4.90667e−098 (CC1G_12965.1 \| Coprinus cinereus |
| | | | | | | | (jgi\|Lacbi1\|161020\|gwh1.2.487.1) | hypothetical protein (translation) (379 aa)) |
| 11907 | 2 | 2 | 1 | 5 | 12 | 5 | 1.20451e−031 | 5.5527e−016 (CC1G_01569.1 \| Coprinus cinereus |
| | | | | | | | (jgi\|Lacbi1\|227966\|e_gwh1.1.1408.1) | hypothetical protein (translation) (878 aa)) |
| 255004 | 73 | 51 | 17 | 149 | 328 | 95 | 1.75263e−038 | 1.13601e−033 (CC1G_01461.1 \| Coprinus cinereus |
| | | | | | | | (jgi\|Lacbi1\|292733\|estExt_fgenesh2_pg.C_40260) | hypothetical protein (translation) (568 aa)) |
| 53446 | 0 | 0 | 0 | 1 | 5 | 0 | 4.91911e−127 | 4.92489e−101 (CC1G_04979.1 \| Coprinus cinereus |
| | | | | | | | (jgi\|Lacbi1\|309166\|eu2.Lbscf0003g08050) | predicted protein (translation) (927 aa)) |
| 269936 | 5 | 11 | 17 | 215 | 239 | 141 | 1.90329e−165 | 1.006e−155 (CC1G_11764.1 \| Coprinus cinereus |
| | | | | | | | (jgi\|Lacbi1\|230018\|e_gwh1.2.213.1) | hypothetical protein (translation) (684 aa)) |
| 66861 | 58 | 62 | 55 | 136 | 195 | 258 | 0.0 | 1.3136e−162 (CC1G_05035.1 \| Coprinus cinereus |
| | | | | | | | (jgi\|Lacbi1\|308722\|eu2.Lbscf0003g03610) | predicted protein (translation) (743 aa)) |
| 102836 | 2 | 3 | 2 | 6 | 13 | 3 | 0.00197812 | 0.0384765 (CC1G_09335.1 \| Coprinus cinereus |
| | | | | | | | (jgi\|Lacbi1\|310368\|eu2.Lbscf0045g00870) | hypothetical protein (translation) (761 aa)) |
| 103145 | 39 | 9 | 159 | 33 | 23 | 45 | 1.13092e−017 | 2.79273 (CC1G_06961.1 \| Coprinus cinereus |
| | | | | | | | (jgi\|Lacbi1\|163053\|gwh1.2.659.1) | hypothetical protein similar to b-glucan synthase |
| | | | | | | | | (translation) (1778 aa)) |
| 105299 | 0 | 0 | 2 | 5 | 13 | 5 | 1.91552e−124 | 4.89067e−121 (CC1G_05112.1 \| Coprinus cinereus |
| | | | | | | | (jgi\|Lacbi1\|293478\|estExt_fgenesh2_pg.C_60495) | predicted protein (translation) (856 aa)) |
| 108072 | 2 | 1 | 7 | 3 | 8 | 11 | 0.000119896 | 0.00172153 (CC1G_04096.1 \| Coprinus cinereus |
| | | | | | | | (jgi\|Lacbi1\|305624\|eu2.Lbscf0002g06820) | predicted protein (translation) (846 aa)) |
| 269932 | 14 | 12 | 6 | 37 | 80 | 79 | 2.4932e−022 | 9.12302e−015 (CC1G_00448.1 \| Coprinus cinereus |
| | | | | | | | (jgi\|Lacbi1\|311840\|eu2.Lbscf0004g07960) | predicted protein (translation) (853 aa)) |
| 113625 | 0 | 1 | 1 | 5 | 2 | 1 | 5.11144e−017 | 2.91369e−020 (CC1G_03384.1 \| Coprinus cinereus |
| | | | | | | | (jgi\|Lacbi1\|324266\|fgenesh3_pg.C_scaffold_5000373) | predicted protein (translation) (472 aa)) |
| 255185 | 6 | 10 | 2 | 37 | 54 | 21 | 0.0 | 0.0 (CC1G_00087.1 \| Coprinus cinereus hypothetical |
| | | | | | | | (jgi\|Lacbi1\|292149\|estExt_fgenesh2_pg.C_20489) | protein (translation) (946 aa)) |
| 255941 | 4 | 4 | 3 | 23 | 64 | 12 | 3.39452e−034 | 1.14738e−038 (CC1G_04277.1 \| Coprinus cinereus |
| | | | | | | | (jgi\|Lacbi1\|292246\|estExt_fgenesh2_pg.C_20664) | predicted protein (translation) (444 aa)) |
| 257652 | 64 | 105 | 39 | 540 | 282 | 541 | 2.23702e−022 | 3.07303e−013 (CC1G_01991.1 \| Coprinus cinereus |
| | | | | | | | (jgi\|Lacbi1\|324166\|fgenesh3_pg.C_scaffold_5000273) | predicted protein (translation) (269 aa)) |
| 112780 | 1 | 0 | 20 | 0 | 1 | 1 | 3.30746e−008 | 8.63879e−006 (CC1G_05981.1 \| Coprinus cinereus |
| | | | | | | | (jgi\|Lacbi1\|312052\|eu2.Lbscf0004g10080) | predicted protein (translation) (278 aa)) |
| 114363 | 11 | 24 | 10 | 113 | 247 | 166 | 4.54998e−018 | 9.482e−011 (CC1G_02553.1 \| Coprinus cinereus |
| | | | | | | | (jgi\|Lacbi1\|295582\|estExt_fgenesh2_pg.C_480074) | predicted protein (translation) (203 aa)) |
| 258543 | 0 | 1 | 0 | 2 | 4 | 0 | 8.22696e−058 | 9.35938e−049 (CC1G_03556.1 \| Coprinus cinereus |
| | | | | | | | (jgi\|Lacbi1\|297675\|eu2.Lbscf0012g02300) | predicted protein (translation) (932 aa)) |
| 85474 | 0 | 2 | 1 | 9 | 8 | 15 | 1.0596 | 0.00216492 (CC1G_02553.1 \| Coprinus cinereus |
| | | | | | | | (jgi\|Lacbi1\|295582\|estExt_fgenesh2_pg.C_480074) | predicted protein (translation) (203 aa)) |
| 110445 | 5 | 5 | 14 | 11 | 17 | 1894 | 0.00110609 | 0.0455875 (CC1G_06494.1 \| Coprinus cinereus |
| | | | | | | | (jgi\|Lacbi1\|305984\|eu2.Lbscf0002g10420) | hypothetical protein (translation) (456 aa)) |
| 111555 | 1 | 1 | 9 | 36 | 50 | 9 | 3.36395e−014 | 0.000545947 (CC1G_03253.1 \| Coprinus cinereus |
| | | | | | | | (jgi\|Lacbi1\|296536\|eu2.Lbscf0010g03450) | hypothetical protein (translation) (638 aa)) |
| 258217 | 0 | 2 | 0 | 3 | 9 | 0 | 2.4074e−129 | 3.69617e−130 (CC1G_11608.1 \| Coprinus cinereus |
| | | | | | | | (jgi\|Lacbi1\|293964\|estExt_fgenesh2_pg.C_90364) | hypothetical protein (translation) (1093 aa)) |

TABLE 1D
Transcription factor genes (first column) that are down regulated at least 4 times compared to monokaryons during some stage of fruiting
body formation. Expression of the transcription factor genes was assessed by MPSS and is expressed in tags per million. Homoloques of the
transcription factors in L. bicolor and C. cinereus are indicated in the last two columns.

| | Monokaryon | Monokaryon | Stage I | | | | | |
|---|---|---|---|---|---|---|---|---|
| ProteinID | light (s) | dark (s) | light (s) | Stage I dark (s) | Stage II light (s) | Mushroom (s) | Laccaria bicolor | Coprinus cinereus |
| 84275 | 356 | 356 | 28 | 794 | 679 | 148 | 3.51123e−028 | 1.05479e−024 (CC1G_00475.1 \| Coprinus cinereus |
| | | | | | | | (jgi\|Lacbi1\|301245\|eu2.Lbscf0001g06940) | predicted protein (translation) (288 aa)) |
| 110229 | 11 | 22 | 1 | 21 | 28 | 2 | 3.72591 | 7.58724e−022 (CC1G_07415.1 \| Coprinus cinereus |
| | | | | | | | (jgi\|Lacbi1\|293031\|estExt_fgenesh2_pg.C_50093) | hypothetical protein (translation) (319 aa)) |
| 110458 | 137 | 152 | 6 | 86 | 46 | 28 | 0.0 | 6.14873e−173 (CC1G_01924.1 \| Coprinus cinereus |
| | | | | | | | (jgi\|Lacbi1\|313737\|eu2.Lbscf0005g03260) | hypothetical protein (translation) (1195 aa)) |
| 81262 | 127 | 142 | 17 | 112 | 147 | 91 | 0.0 (jgi\|Lacbi1\|141130\|gww1.6.14.1) | 0.0 (CC1G_05143.1 \| Coprinus cinereus hypothetical |
| | | | | | | | | protein (translation) (2340 aa)) |
| 269939 | 61 | 20 | 4 | 15 | 12 | 13 | 0.000340456 | 0.0207699 (CC1G_03679.1 \| Coprinus cinereus |
| | | | | | | | (jgi\|Lacbi1\|300830\|eu2.Lbscf0001g02790) | predicted protein (translation) (172 aa)) |
| 112634 | 10 | 9 | 19 | 2 | 2 | 7 | 2.32919e−007 | 0.00611536 (CC1G_02682.1 \| Coprinus cinereus |
| | | | | | | | (jgi\|Lacbi1\|303693\|eu2.Lbscf0025g00280) | predicted protein (translation) (126 aa)) |
| 255183 | 16 | 19 | 20 | 31 | 20 | 3 | 1.98491e−040 | 4.57118e−031 (CC1G_12420.1 \| Coprinus cinereus |
| | | | | | | | (jgi\|Lacbi1\|327087\|fgenesh3_pg.C_scaffold_11000389) | predicted protein (translation) (642 aa)) |
| 80526 | 180 | 96 | 13 | 101 | 38 | 88 | 3.1483e−035 | 6.97275e−024 (CC1G_00462.1 \| Coprinus cinereus |
| | | | | | | | (jgi\|Lacbi1\|312016\|eu2.Lbscf0004g09720) | predicted protein (translation) (486 aa)) |
| 107138 | 8 | 14 | 5 | 11 | 9 | 1 | 2.73236e−145 | 1.20794e−144 (CC1G_11705.1 \| Coprinus cinereus |
| | | | | | | | (jgi\|Lacbi1\|309262\|eu2.Lbscf0003g09010) | hypothetical protein (translation) (788 aa)) |
| 236743 | 16 | 26 | 5 | 36 | 8 | 3 | 2.36001e−047 | 1.14005e−051 (CC1G_04606.1 \| Coprinus cinereus |
| | | | | | | | (jgi\|Lacbi1\|298274\|eu2.Lbscf0013g03480) | predicted protein (translation) (429 aa)) |
| 84273 | 342 | 338 | 49 | 169 | 104 | 77 | 1.45714e−024 | 4.26924e−021 (CC1G_00473.1 \| Coprinus cinereus |
| | | | | | | | (jgi\|Lacbi1\|320903\|fgenesh3_pg.C_scaffold_1000473) | predicted protein (translation) (149 aa)) |
| 71685 | 158 | 312 | 16 | 192 | 128 | 46 | 0.0 | 0.0 (CC1G_00311.1 \| Coprinus cinereus predicted |
| | | | | | | | (jgi\|Lacbi1\|311799\|eu2.Lbscf0004g07550) | protein (translation) (804 aa)) |
| 255836 | 69 | 119 | 6 | 57 | 42 | 22 | 5.64052e−064 | 5.42325e−060 (CC1G_10208.1 \| Coprinus cinereus |
| | | | | | | | (jgi\|Lacbi1\|147701\|gww1.7.218.1) | hypothetical protein (translation) (658 aa)) |
| 255161 | 287 | 213 | 15 | 311 | 106 | 65 | 2.23106e−051 | 1.76778e−050 (CC1G_01262.1 \| Coprinus cinereus |
| | | | | | | | (jgi\|Lacbi1\|311992\|eu2.Lbscf0004g09480) | hypothetical protein (translation) (436 aa)) |
| 82694 | 91 | 147 | 18 | 166 | 239 | 59 | 4.7646e−026 | 1.79347e−021 (CC1G_02249.1 \| Coprinus cinereus |
| | | | | | | | (jgi\|Lacbi1\|293210\|estExt_fgenesh2_pg.C_50421) | predicted protein (translation) (460 aa)) |
| 112825 | 33 | 35 | 8 | 61 | 66 | 12 | 4.78753e−049 | 1.71008e−050 (CC1G_01657.1 \| Coprinus cinereus |
| | | | | | | | (jgi\|Lacbi1\|318917\|eu2.Lbscf0009g02770) | hypothetical protein (translation) (372 aa)) |
| 257915 | 256 | 224 | 7 | 156 | 170 | 31 | 7.94765e−037 | 0.0677954 (CC1G_13487.1 \| Coprinus cinereus |
| | | | | | | | (jgi\|Lacbi1\|294648\|estExt_fgenesh2_pg.C_180094) | hypothetical protein (translation) (421 aa)) |
| 81412 | 25 | 52 | 6 | 22 | 29 | 13 | 0.00052408 | 1.3798 (CC1G_11549.1 \| Coprinus cinereus |
| | | | | | | | (jgi\|Lacbi1\|301200\|eu2.Lbscf0001g06490) | hypothetical protein (translation) (413 aa)) |
| 269943 | 20 | 6 | 4 | 2 | 2 | 1 | 2.03637e−014 | 4.5042e−010 (CC1G_09698.1 \| Coprinus cinereus |
| | | | | | | | (jgi\|Lacbi1\|318938\|eu2.Lbscf0009g02980) | predicted protein (translation) (370 aa)) |
| 104375 | 5 | 9 | 1 | 7 | 9 | 5 | 0.0 | 0.0 (CC1G_00528.1 \| Coprinus cinereus hypothetical |
| | | | | | | | (jgi\|Lacbi1\|301359\|eu2.Lbscf0001g08080) | protein (translation) (1155 aa)) |
| 85886 | 43 | 116 | 4 | 118 | 73 | 33 | 1.11822e−113 | 2.51255e−110 (CC1G_07649.1 \| Coprinus cinereus |
| | | | | | | | (jgi\|Lacbi1\|294384\|estExt_fgenesh2_pg.C_120202) | hypothetical protein (translation) (1828 aa)) |
| 232127 | 13 | 22 | 3 | 22 | 17 | 14 | 3.20966e−024 | 1.37253e−020 (CC1G_01030.1 \| Coprinus cinereus |
| | | | | | | | (jgi\|Lacbi1\|307389\|eu2.Lbscf0035g00480) | predicted protein (translation) (971 aa)) |
| 257445 | 317 | 359 | 22 | 255 | 172 | 75 | 4.58631e−076 | 4.20981e−055 (CC1G_05561.1 \| Coprinus cinereus |
| | | | | | | | (jgi\|Lacbi1\|295409\|estExt_fgenesh2_pg.C_400037) | hypothetical protein (translation) (641 aa)) |
| 104344 | 6 | 16 | 0 | 4 | 2 | 0 | 9.3631e−021 | 9.96152e−011 (CC1G_01834.1 \| Coprinus cinereus |
| | | | | | | | (jgi\|Lacbi1\|301103\|eu2.Lbscf0001g05520) | hypothetical protein similar to a 1-2 protein |
| | | | | | | | | (translation) (614 aa)) |
| 81107 | 46 | 63 | 4 | 69 | 58 | 57 | 0.647628 | 0.0585053 (CC1G_12431.1 \| Coprinus cinereus |
| | | | | | | | (jgi\|Lacbi1\|327452\|fgenesh3_pg.C_scaffold_12000342) | hypothetical protein (translation) (479 aa)) |
| 269944 | 38 | 58 | 7 | 116 | 106 | 53 | 5.19099e−020 | 1.15336e−014 (CC1G_06364.1 \| Coprinus cinereus |
| | | | | | | | (jgi\|Lacbi1\|297310\|eu2.Lbscf0011g04670) | predicted protein (translation) (1332 aa)) |
| 255863 | 11 | 75 | 0 | 49 | 42 | 2 | 2.47285e−020 | 1.16841e−018 (CC1G_04121.1 \| Coprinus cinereus |
| | | | | | | | (jgi\|Lacbi1\|327972\|fgenesh3_pg.C_scaffold_14000219) | hypothetical protein (translation) (434 aa)) |
| 109936 | 13 | 54 | 2 | 35 | 18 | 7 | 1.35204e−078 | 1.762e−066 (CC1G_04598.1 \| Coprinus cinereus |
| | | | | | | | (jgi\|Lacbi1\|294487\|estExt_fgenesh2_pg.C_130174) | predicted protein (translation) (1238 aa)) |
| 111683 | 10 | 16 | 2 | 21 | 17 | 5 | 7.20095e−007 | 7.38744e−007 (CC1G_06427.1 \| Coprinus cinereus |
| | | | | | | | (jgi\|Lacbi1\|298964\|eu2.Lbscf0015g01100) | hypothetical protein (translation) (390 aa)) |
| 232060 | 5 | 7 | 0 | 7 | 7 | 7 | 1.63353e−006 | 5.78542e−008 (CC1G_00255.1 \| Coprinus cinereus |
| | | | | | | | (jgi\|Lacbi1\|311738\|eu2.Lbscf0004g06940) | predicted protein (translation) (480 aa)) |
| 66326 | 54 | 234 | 3 | 166 | 122 | 26 | 5.1963e−042 | 4.54227e−039 (CC1G_01569.1 \| Coprinus cinereus |
| | | | | | | | (jgi\|Lacbi1\|293949\|estExt_fgenesh2_pg.C_90336) | hypothetical protein (translation) (878 aa)) |
| 86018 | 84 | 212 | 3 | 114 | 70 | 33 | 4.04465e−108 | 4.52565e−090 (CC1G_01569.1 \| Coprinus cinereus |
| | | | | | | | (jgi\|Lacbi1\|293949\|estExt_fgenesh2_pg.C_90336) | hypothetical protein (translation) (878 aa)) |
| 257247 | 26 | 21 | 4 | 30 | 26 | 15 | 5.18591e−110 | 8.40596e−086 (CC1G_06391.1 \| Coprinus cinereus |
| | | | | | | | (jgi\|Lacbi1\|297145\|eu2.Lbscf0011g03020) | hypothetical protein (translation) (544 aa)) |
| 63699 | 75 | 588 | 5 | 351 | 224 | 48 | 2.15172e−056 | 1.81485e−037 (CC1G_00101.1 \| Coprinus cinereus |
| | | | | | | | (jgi\|Lacbi1\|305681\|eu2.Lbscf0002g07390) | predicted protein (translation) (504 aa)) |
| 111405 | 25 | 40 | 2 | 37 | 42 | 26 | 2.56691e−008 | 1.81797e−010 (CC1G_01905.1 \| Coprinus cinereus |
| | | | | | | | (jgi\|Lacbi1\|293995\|estExt_fgenesh2_pg.C_100036) | predicted protein (translation) (479 aa)) |
| 257455 | 16 | 20 | 1 | 18 | 14 | 14 | 3.47293e−019 | 1.835e−018 (CC1G_06938.1 \| Coprinus cinereus |
| | | | | | | | (jgi\|Lacbi1\|317361\|eu2.Lbscf0007g04890) | predicted protein (translation) (1514 aa)) |
| 52392 | 29 | 11 | 1 | 1 | 6 | 1 | 3.02104e−139 | 3.53753e−119 (CC1G_02915.1 \| Coprinus cinereus |
| | | | | | | | (jgi\|Lacbi1\|309008\|eu2.Lbscf0003g06470) | predicted protein (translation) (730 aa)) |
| 257495 | 85 | 39 | 4 | 23 | 9 | 8 | 0.0 | 0.0 (CC1G_09834.1 \| Coprinus cinereus predicted |
| | | | | | | | (jgi\|Lacbi1\|317073\|eu2.Lbscf0007g02010) | protein (translation) (1043 aa)) |
| 57298 | 9 | 7 | 1 | 7 | 5 | 7 | 3.19925e−023 | 1.54075e−028 (CC1G_01588.1 \| Coprinus cinereus |
| | | | | | | | (jgi\|Lacbi1\|293198\|estExt_fgenesh2_pg.C_50395) | predicted protein (translation) (293 aa)) |
| 86194 | 21 | 18 | 1 | 73 | 50 | 4 | 2.45579e−025 | 2.79927e−031 (CC1G_08665.1 \| Coprinus cinereus |
| | | | | | | | (jgi\|Lacbi1\|247901\|e_gww1.7.313.1) | hypothetical protein (translation) (632 aa)) |
| 74309 | 11 | 27 | 2 | 19 | 12 | 3 | 4.04216e−160 | 2.70609e−057 (CC1G_05174.1 \| Coprinus cinereus |
| | | | | | | | (jgi\|Lacbi1\|316098\|eu2.Lbscf0006g07820) | hypothetical protein (translation) (449 aa)) |
| 74719 | 21 | 45 | 5 | 21 | 15 | 13 | 0.0 | 0.0 (CC1G_01048.1 \| Coprinus cinereus hypothetical |
| | | | | | | | (jgi\|Lacbi1\|305811\|eu2.Lbscf0002g08690) | protein (translation) (1017 aa)) |
| 78089 | 24 | 39 | 1 | 22 | 16 | 12 | 3.02159e−142 | 4.92773e−124 (CC1G_09309.1 \| Coprinus cinereus |
| | | | | | | | (jgi\|Lacbi1\|313614\|eu2.Lbscf0005g02030) | predicted protein (translation) (553 aa)) |
| 81726 | 14 | 32 | 3 | 28 | 33 | 20 | 0.0 | 0.0 (CC1G_02934.1 \| Coprinus cinereus hypothetical |
| | | | | | | | (jgi\|Lacbi1\|309255\|eu2.Lbscf0003g08940) | protein (translation) (703 aa)) |
| 81806 | 267 | 183 | 39 | 483 | 322 | 515 | 1.51176e−061 | 4.60296e−072 (CC1G_08004.1 \| Coprinus cinereus |
| | | | | | | | (jgi\|Lacbi1\|312043\|eu2.Lbscf0004g09990) | predicted protein (translation) (433 aa)) |
| 84657 | 4 | 12 | 1 | 35 | 36 | 5 | 1.34045e−080 | 2.71068e−039 (CC1G_09309.1 \| Coprinus cinereus |
| | | | | | | | (jgi\|Lacbi1\|293353\|estExt_fgenesh2_pg.C_60305) | predicted protein (translation) (553 aa)) |
| 84684 | 20 | 95 | 1 | 37 | 13 | 6 | 3.11314e−009 | 9.49477e−009 (CC1G_01752.1 \| Coprinus cinereus |
| | | | | | | | (jgi\|Lacbi1\|301023\|eu2.Lbscf0001g04720) | predicted protein (translation) (176 aa)) |
| 269945 | 8 | 9 | 1 | 15 | 14 | 6 | 0.558256 | 8.39053e−005 (CC1G_04998.1 \| Coprinus cinereus |
| | | | | | | | (jgi\|Lacbi1\|297319\|eu2.Lbscf0011g04760) | predicted protein (translation) (540 aa)) |
| 255385 | 29 | 24 | 1 | 37 | 18 | 31 | 6.12672e−005 | 1.35469e−005 (CC1G_09834.1 \| Coprinus cinereus |
| | | | | | | | (jgi\|Lacbi1\|317073\|eu2.Lbscf0007g02010) | predicted protein (translation) (1043 aa)) |
| 269948 | 8 | 29 | 0 | 39 | 52 | 9 | 1.45195e−130 | 1.67247e−052 (CC1G_11570.1 \| Coprinus cinereus |
| | | | | | | | (jgi\|Lacbi1\|305537\|eu2.Lbscf0002g05950) | hypothetical protein (translation) (349 aa)) |
| 109190 | 134 | 19 | 28 | 6 | 3 | 12 | 2.72907e−094 | 1.3879e−073 (CC1G_02275.1 \| Coprinus cinereus |
| | | | | | | | (jgi\|Lacbi1\|315220\|eu2.Lbscf0069g00020) | hypothetical protein (translation) (960 aa)) |
| 269950 | 6 | 17 | 1 | 22 | 40 | 7 | 4.75256e−040 | 2.63605e−025 (CC1G_12565.1 \| Coprinus cinereus |
| | | | | | | | (jgi\|Lacbi1\|297262\|eu2.Lbscf0011g04190) | hypothetical protein (translation) (1114 aa)) |
| 269952 | 5 | 7 | 1 | 13 | 9 | 9 | 2.91537e−009 | 1.36788e−007 (CC1G_06668.1 \| Coprinus cinereus |
| | | | | | | | (jgi\|Lacbi1\|296436\|eu2.Lbscf0010g02450) | hypothetical protein (translation) (648 aa)) |
| 110136 | 134 | 79 | 15 | 266 | 187 | 131 | 2.67901e−009 | 1.42573e−016 (CC1G_07536.1 \| Coprinus cinereus |
| | | | | | | | (jgi\|Lacbi1\|310623\|eu2.Lbscf0047g00510) | predicted protein (translation) (262 aa)) |
| 110416 | 115 | 53 | 2 | 6 | 3 | 5 | 3.57277e−013 | 0.000851334 (CC1G_11170.1 \| Coprinus cinereus |
| | | | | | | | (jgi\|Lacbi1\|313811\|eu2.Lbscf0005g04000) | hypothetical protein (translation) (429 aa)) |
| 269956 | 222 | 76 | 19 | 55 | 19 | 122 | 2.71131e−047 | 9.94127e−007 (CC1G_00937.1 \| Coprinus cinereus |
| | | | | | | | (jgi\|Lacbi1\|299004\|eu2.Lbscf0015g01500) | hypothetical protein (translation) (473 aa)) |
| 231698 | 10 | 4 | 0 | 3 | 2 | 1 | 2.12687e−008 | 0.00144182 (CC1G_01833.1 \| Coprinus cinereus |
| | | | | | | | (jgi\|Lacbi1\|243459\|e_gww1.1.1010.1) | hypothetical protein (translation) (449 aa)) |
| 269958 | 140 | 95 | 8 | 64 | 61 | 19 | 9.22881e−032 | 2.43397e−026 (CC1G_06624.1 \| Coprinus cinereus |
| | | | | | | | (jgi\|Lacbi1\|320896\|fgenesh3_pg.C_scaffold_1000466) | predicted protein (translation) (615 aa)) |
| 255490 | 16 | 17 | 2 | 21 | 52 | 14 | 2.13217e−043 | 2.32009e−033 (CC1G_06721.1 \| Coprinus cinereus |
| | | | | | | | (jgi\|Lacbi1\|291485\|estExt_fgenesh2_pg.C_10083) | predicted protein (translation) (1168 aa)) |
| 255852 | 14 | 21 | 2 | 35 | 25 | 22 | 0.0 | 0.0 (CC1G_01056.1 \| Coprinus cinereus hypothetical |
| | | | | | | | (jgi\|Lacbi1\|307391\|eu2.Lbscf0035g00500) | protein (translation) (848 aa)) |
| 256135 | 16 | 13 | 2 | 33 | 10 | 2 | 6.41127e−146 | 8.05896e−081 (CC1G_02690.1 \| Coprinus cinereus |
| | | | | | | | (jgi\|Lacbi1\|305928\|eu2.Lbscf0002g09860) | hypothetical protein (translation) (801 aa)) |
| 257926 | 180 | 333 | 36 | 412 | 478 | 51 | 5.27989e−010 | 8.2724e−009 (CC1G_09318.1 \| Coprinus cinereus |
| | | | | | | | (jgi\|Lacbi1\|304198\|eu2.Lbscf0271g00010) | predicted protein (translation) (411 aa)) |
| 257987 | 37 | 142 | 1 | 79 | 59 | 15 | 3.52426e−038 | 1.82065e−018 (CC1G_01962.1 \| Coprinus cinereus |
| | | | | | | | (jgi\|Lacbi1\|293988\|estExt_fgenesh2_pg.C_100022) | predicted protein (translation) (560 aa)) |
| 269960 | 4 | 15 | 0 | 15 | 17 | 1 | 1.24493e−036 | 8.86947e−028 (CC1G_05468.1 \| Coprinus cinereus |
| | | | | | | | (jgi\|Lacbi1\|294583\|estExt_fgenesh2_pg.C_160148) | hypothetical protein (translation) (1311 aa)) |
| 257265 | 134 | 283 | 4 | 77 | 60 | 24 | 6.99718e−008 | 1.62257e−006 (CC1G_07030.1 \| Coprinus cinereus |
| | | | | | | | (jgi\|Lacbi1\|298964\|eu2.Lbscf0015g01100) | predicted protein (translation) (468 aa)) |
| 269961 | 78 | 24 | 17 | 7 | 3 | 14 | 0.0309308 | 2.19663 (CC1G_03809.1 \| Coprinus cinereus |
| | | | | | | | (jgi\|Lacbi1\|311738\|eu2.Lbscf0004g06940) | hypothetical protein (translation) (2341 aa)) |
| 110354 | 4 | 9 | 1 | 26 | 29 | 7 | 1.31693e−049 | 4.87952e−040 (CC1G_04483.1 \| Coprinus cinereus |
| | | | | | | | (jgi\|Lacbi1\|313784\|eu2.Lbscf0005g03730) | hypothetical protein (translation) (373 aa)) |
| 84749 | 138 | 115 | 13 | 28 | 12 | 2 | 1.54768e−012 | 0.00102858 (CC1G_04483.1 \| Coprinus cinereus |
| | | | | | | | (jgi\|Lacbi1\|296536\|eu2.Lbscf0010g03450) | hypothetical protein (translation) (373 aa)) |
| 110478 | 10 | 10 | 5 | 2 | 2 | 12 | 3.08918e−006 | 6.85377e−012 (CC1G_02553.1 \| Coprinus cinereus |
| | | | | | | | (jgi\|Lacbi1\|295582\|estExt_fgenesh2_pg.C_480074) | predicted protein (translation) (203 aa)) |
| 254870 | 9 | 41 | 2 | 18 | 13 | 15 | 4.85676e−019 | 5.50242e−009 (CC1G_13435.1 \| Coprinus cinereus |
| | | | | | | | (jgi\|Lacbi1\|294684\|estExt_fgenesh2_pg.C_190064) | predicted protein (translation) (477 aa)) |
| 258883 | 8 | 7 | 0 | 8 | 9 | 1 | 6.57999e−035 | 2.04345e−039 (CC1G_00671.1 \| Coprinus cinereus |
| | | | | | | | (jgi\|Lacbi1\|301563\|eu2.Lbscf0001g10120) | hypothetical protein (translation) (594 aa)) |
| 108605 | 16 | 6 | 1 | 10 | 4 | 3 | 0.000123481 | 0.000230165 (CC1G_00937.1 \| Coprinus cinereus |
| | | | | | | | (jgi\|Lacbi1\|150072\|gww1.21.88.1) | hypothetical protein (translation) (473 aa)) |
| 256746 | 262 | 109 | 4 | 3 | 3 | 4 | 0.012 | 0.0235741 (CC1G_00609.1 \| Coprinus cinereus |
| | | | | | | | (jgi\|Lacbi1\|305505\|eu2.Lbscf0002g05630) | hypothetical protein (translation) (294 aa)) |
| 258642 | 48 | 30 | 5 | 22 | 11 | 21 | 0.137871 | 0.00187319 (CC1G_11643.1 \| Coprinus cinereus |
| | | | | | | | (jgi\|Lacbi1\|301087\|eu2.Lbscf0001g05360) | predicted protein (translation) (361 aa)) |
| 83895 | 31 | 51 | 1 | 15 | 13 | 10 | 9.3958e−012 | 1.69333e−016 (CC1G_01345.1 \| Coprinus cinereus |
| | | | | | | | (jgi\|Lacbi1\|305984\|eu2.Lbscf0002g10420) | predicted protein (translation) (468 aa)) |
| 84085 | 4 | 11 | 1 | 22 | 15 | 4 | 2.07695e−073 | 1.7064e−051 (CC1G_04390.1 \| Coprinus cinereus |
| | | | | | | | (jgi\|Lacbi1\|301763\|eu2.Lbscf0001g12120) | hypothetical protein (translation) (342 aa)) |
| 233946 | 9 | 7 | 1 | 4 | 5 | 5 | 2.70722e−007 | 1.06564e−006 (CC1G_09111.1 \| Coprinus cinereus |
| | | | | | | | (jgi\|Lacbi1\|150072\|gww1.21.88.1) | hypothetical protein (translation) (549 aa)) |

TABLE 1E
Transcription factor genes (first column) that are up regulated at least 10 times compared to monokaryons during some
stage of fruiting body formation. Expression of the transcription factor genes was assessed by MPSS and is expressed in tags
per million. Homoloques of the transcription factors in L. bicolour and C. cinereus are indicated in the last two columns.

| ProteinID | Monokaryon light (s) | Monokaryon dark (s) | Stage I light (s) | Stage I dark (s) | Stage II light (s) | Mushroom (s) |
|---|---|---|---|---|---|---|
| 80413 | 75 | 142 | 767 | 1373 | 3741 | 548 |
| 236086 | 1 | 0 | 0 | 9 | 15 | 7 |
| 269936 | 5 | 11 | 17 | 215 | 239 | 141 |
| 105299 | 0 | 0 | 2 | 5 | 13 | 5 |
| 255941 | 4 | 4 | 3 | 23 | 64 | 12 |
| 112780 | 1 | 0 | 20 | 0 | 1 | 1 |
| 114363 | 11 | 24 | 10 | 113 | 247 | 166 |
| 110445 | 5 | 5 | 14 | 11 | 17 | 1894 |
| 111555 | 1 | 1 | 9 | 36 | 50 | 9 |

| ProteinID | Laccaria bicolor | Coprinus cinereus |
|---|---|---|
| 80413 | 4.37799e−016 | 1.50246e−015 (CC1G_00158.1 \| Coprinus cinereus |
| | (jgi\|Lacbi1\|307632\|eu2.Lbscf0036g00800) | predicted protein (translation) (207 aa)) |
| 236086 | 3.49156e−039 | 1.24586e−029 (CC1G_09355.1 \| Coprinus cinereus |
| | (jgi\|Lacbi1\|296378\|eu2.Lbscf0010g01870) | predicted protein (translation) (493 aa)) |
| 269936 | 1.90329e−165 | 1.006e−155 (CC1G_11764.1 \| Coprinus cinereus |
| | (jgi\|Lacbi1\|230018\|e_gwh1.2.213.1) | hypothetical protein (translation) (684 aa)) |
| 105299 | 1.91552e−124 | 4.89067e−121 (CC1G_05112.1 \| Coprinus cinereus |
| | (jgi\|Lacbi1\|293478\|estExt_fgenesh2_pg.C_60495) | predicted protein (translation) (856 aa)) |
| 255941 | 3.39452e−034 | 1.14738e−038 (CC1G_04277.1 \| Coprinus cinereus |
| | (jgi\|Lacbi1\|292246\|estExt_fgenesh2_pg.C_20664) | predicted protein (translation) (444 aa)) |
| 112780 | 3.30746e−008 | 8.63879e−006 (CC1G_05981.1 \| Coprinus cinereus |
| | (jgi\|Lacbi1\|312052\|eu2.Lbscf0004g10080) | predicted protein (translation) (278 aa)) |
| 114363 | 4.54998e−018 | 9.482e−011 (CC1G_02553.1 \| Coprinus cinereus |
| | (jgi\|Lacbi1\|295582\|estExt_fgenesh2_pg.C_480074) | predicted protein (translation) (203 aa)) |
| 110445 | 0.00110609 | 0.0455875 (CC1G_06494.1 \| Coprinus cinereus |
| | (jgi\|Lacbi1\|305984\|eu2.Lbscf0002g10420) | hypothetical protein (translation) (456 aa)) |
| 111555 | 3.36395e−014 | 0.000545947 (CC1G_03253.1 \| Coprinus cinereus |
| | (jgi\|Lacbi1\|296536\|eu2.Lbscf0010g03450) | hypothetical protein (translation) (638 aa)) |

TABLE 1F
Transcription factor genes (first column) that are down regulated at least 10 times compared to monokaryons during some stage of fruiting
body formation. Expression of the transcription factor genes was assessed by MPSS and is expressed in tags per million. Homoloques of the
transcription factors in L. bicolour and C. cinereus are indicated in the last two columns.

| | Monokaryon | Monokaryon | Stage I | | | | | |
|---|---|---|---|---|---|---|---|---|
| ProteinID | light (s) | dark (s) | light (s) | Stage I dark (s) | Stage II light (s) | Mushroom (s) | Laccaria bicolor | Coprinus cinereus |
| 84275 | 356 | 356 | 28 | 794 | 679 | 148 | 3.51123e−028 | 1.05479e−024 (CC1G_00475.1 \| Coprinus cinereus |
| | | | | | | | (jgi\|Lacbi1\|301245\|eu2.Lbscf0001g06940) | predicted protein (translation) (288 aa)) |
| 110229 | 11 | 22 | 1 | 21 | 28 | 2 | 3.72591 | 7.58724e−022 (CC1G_07415.1 \| Coprinus cinereus |
| | | | | | | | (jgi\|Lacbi1\|293031\|estExt_fgenesh2_pg.C_50093) | hypothetical protein (translation) (319 aa)) |
| 110458 | 137 | 152 | 6 | 86 | 46 | 28 | 0.0 | 6.14873e−173 (CC1G_01924.1 \| Coprinus cinereus |
| | | | | | | | (jgi\|Lacbi1\|313737\|eu2.Lbscf0005g03260) | hypothetical protein (translation) (1195 aa)) |
| 255836 | 69 | 119 | 6 | 57 | 42 | 22 | 5.64052e−064 | 5.42325e−060 (CC1G_10208.1 \| Coprinus cinereus |
| | | | | | | | (jgi\|Lacbi1\|147701\|gww1.7.218.1) | hypothetical protein (translation) (658 aa)) |
| 255161 | 287 | 213 | 15 | 311 | 106 | 65 | 2.23106e−051 | 1.76778e−050 (CC1G_01262.1 \| Coprinus cinereus |
| | | | | | | | (jgi\|Lacbi1\|311992\|eu2.Lbscf0004g09480) | hypothetical protein (translation) (436 aa)) |
| 257915 | 256 | 224 | 7 | 156 | 170 | 31 | 7.94765e−037 | 0.0677954 (CC1G_13487.1 \| Coprinus cinereus |
| | | | | | | | (jgi\|Lacbi1\|294648\|estExt_fgenesh2_pg.C_180094) | hypothetical protein (translation) (421 aa)) |
| 85886 | 43 | 116 | 4 | 118 | 73 | 33 | 1.11822e−113 | 2.51255e−110 (CC1G_07649.1 \| Coprinus cinereus |
| | | | | | | | (jgi\|Lacbi1\|294384\|estExt_fgenesh2_pg.C_120202) | hypothetical protein (translation) (1828 aa)) |
| 257445 | 317 | 359 | 22 | 255 | 172 | 75 | 4.58631e−076 | 4.20981e−055 (CC1G_05561.1 \| Coprinus cinereus |
| | | | | | | | (jgi\|Lacbi1\|295409\|estExt_fgenesh2_pg.C_400037) | hypothetical protein (translation) (641 aa)) |
| 81107 | 46 | 63 | 4 | 69 | 58 | 57 | 0.647628 | 0.0585053 (CC1G_12431.1 \| Coprinus cinereus |
| | | | | | | | (jgi\|Lacbi1\|327452\|fgenesh3_pg.C_scaffold_12000342) | hypothetical protein (translation) (479 aa)) |
| 255863 | 11 | 75 | 0 | 49 | 42 | 2 | 2.47285e−020 | 1.16841e−018 (CC1G_04121.1 \| Coprinus cinereus |
| | | | | | | | (jgi\|Lacbi1\|327972\|fgenesh3_pg.C_scaffold_14000219) | hypothetical protein (translation) (434 aa)) |
| 66326 | 54 | 234 | 3 | 166 | 122 | 26 | 5.1963e−042 | 4.54227e−039 (CC1G_01569.1 \| Coprinus cinereus |
| | | | | | | | (jgi\|Lacbi1\|293949\|estExt_fgenesh2_pg.C_90336) | hypothetical protein (translation) (878 aa)) |
| 86018 | 84 | 212 | 3 | 114 | 70 | 33 | 4.04465e−108 | 4.52565e−090 (CC1G_01569.1 \| Coprinus cinereus |
| | | | | | | | (jgi\|Lacbi1\|293949\|estExt_fgenesh2_pg.C_90336) | hypothetical protein (translation) (878 aa)) |
| 63699 | 75 | 588 | 5 | 351 | 224 | 48 | 2.15172e−056 | 1.81485e−037 (CC1G_00101.1 \| Coprinus cinereus |
| | | | | | | | (jgi\|Lacbi1\|305681\|eu2.Lbscf0002g07390) | predicted protein (translation) (504 aa)) |
| 111405 | 25 | 40 | 2 | 37 | 42 | 26 | 2.56691e−008 | 1.81797e−010 (CC1G_01905.1 \| Coprinus cinereus |
| | | | | | | | (jgi\|Lacbi1\|293995\|estExt_fgenesh2_pg.C_100036) | predicted protein (translation) (479 aa)) |
| 257455 | 16 | 20 | 1 | 18 | 14 | 14 | 3.47293e−019 | 1.835e−018 (CC1G_06938.1 \| Coprinus cinereus |
| | | | | | | | (jgi\|Lacbi1\|317361\|eu2.Lbscf0007g04890) | predicted protein (translation) (1514 aa)) |
| 52392 | 29 | 11 | 1 | 1 | 6 | 1 | 3.02104e−139 | 3.53753e−119 (CC1G_02915.1 \| Coprinus cinereus |
| | | | | | | | (jgi\|Lacbi1\|309008\|eu2.Lbscf0003g06470) | predicted protein (translation) (730 aa)) |
| 86194 | 21 | 18 | 1 | 73 | 50 | 4 | 2.45579e−025 | 2.79927e−031 (CC1G_08665.1 \| Coprinus cinereus |
| | | | | | | | (jgi\|Lacbi1\|247901\|e_gww1.7.313.1) | hypothetical protein (translation) (632 aa)) |
| 78089 | 24 | 39 | 1 | 22 | 16 | 12 | 3.02159e−142 | 4.92773e−124 (CC1G_09309.1 \| Coprinus cinereus |
| | | | | | | | (jgi\|Lacbi1\|313614\|eu2.Lbscf0005g02030) | predicted protein (translation) (553 aa)) |
| 84684 | 20 | 95 | 1 | 37 | 13 | 6 | 3.11314e−009 | 9.49477e−009 (CC1G_01752.1 \| Coprinus cinereus |
| | | | | | | | (jgi\|Lacbi1\|301023\|eu2.Lbscf0001g04720) | predicted protein (translation) (176 aa)) |
| 255385 | 29 | 24 | 1 | 37 | 18 | 31 | 6.12672e−005 | 1.35469e−005 (CC1G_09834.1 \| Coprinus cinereus |
| | | | | | | | (jgi\|Lacbi1\|317073\|eu2.Lbscf0007g02010) | predicted protein (translation) (1043 aa)) |
| 110416 | 115 | 53 | 2 | 6 | 3 | 5 | 3.57277e−013 | 0.000851334 (CC1G_11170.1 \| Coprinus cinereus |
| | | | | | | | (jgi\|Lacbi1\|313811\|eu2.Lbscf0005g04000) | hypothetical protein (translation) (429 aa)) |
| 269958 | 140 | 95 | 8 | 64 | 61 | 19 | 9.22881e−032 | 2.43397e−026 (CC1G_06624.1 \| Coprinus cinereus |
| | | | | | | | (jgi\|Lacbi1\|320896\|fgenesh3_pg.C_scaffold_1000466) | predicted protein (translation) (615 aa)) |
| 257987 | 37 | 142 | 1 | 79 | 59 | 15 | 3.52426e−038 | 1.82065e−018 (CC1G_01962.1 \| Coprinus cinereus |
| | | | | | | | (jgi\|Lacbi1\|293988\|estExt_fgenesh2_pg.C_100022) | predicted protein (translation) (560 aa)) |
| 257265 | 134 | 283 | 4 | 77 | 60 | 24 | 6.99718e−008 | 1.62257e−006 (CC1G_07030.1 \| Coprinus cinereus |
| | | | | | | | (jgi\|Lacbi1\|298964\|eu2.Lbscf0015g01100) | predicted protein (translation) (468 aa)) |
| 84749 | 138 | 115 | 13 | 28 | 12 | 2 | 1.54768e−012 | 0.00102858 (CC1G_04483.1 \| Coprinus cinereus |
| | | | | | | | (jgi\|Lacbi1\|296536\|eu2.Lbscf0010g03450) | hypothetical protein (translation) (373 aa)) |
| 256746 | 262 | 109 | 4 | 3 | 3 | 4 | 0.012 | 0.0235741 (CC1G_00609.1 \| Coprinus cinereus |
| | | | | | | | (jgi\|Lacbi1\|305505\|eu2.Lbscf0002g05630) | hypothetical protein (translation) (294 aa)) |
| 83895 | 31 | 51 | 1 | 15 | 13 | 10 | 9.3958e−012 | 1.69333e−016 (CC1G_01345.1 \| Coprinus cinereus |
| | | | | | | | (jgi\|Lacbi1\|305984\|eu2.Lbscf0002g10420) | predicted protein (translation) (468 aa)) |

### Conservation of POLYPEPTIDEs in the Fungal Kingdom

[0123] In order to determine the level of conservation of the TFs throughout the fungal kingdom, protein sequences were blasted against the protein databases of Laccaria bicolor, Coprinus cinereus, Phanerochaete chrysosporium, Cryptococcus neoformans (H99), Cryptococcus neoformans (JEC21), Ustilago maydis, Aspergillus niger (DSM sequence), Aspergillus niger (Broad Institute), Magnaporthe grisea and Neurospora crassa.

[0124] The expect value and the name of the highest hit with the protein databases of the mushroom forming fungi Coprinus cinereus and Laccaria bicolor are indicated in Table 1.

### Example 2

### Proof of Principle: A Knockout of fst3 (proteinID 257422) Affects Mushroom Development

[0125] A knock-out was made of the putative transcription factor gene fst3 (proteinID 257422). To this end, vector pDelcas was used as described in Ohm et al. (2010). Primers that were used to create the knock out construct are indicated in Table 2. This knock out construct called pRO097 consists of the flanking regions of the coding sequence of fst3 in between which the nourseothricin resistance cassette is situated. The phleomycin resistance cassette is present elsewhere in the construct (for details see Ohm et al., 2010). Transformation of S. commune strain H4-8 was done as described (van Peer et al., 2009). Regeneration medium contained no antibiotic, whereas selection plates contained 20 μg ml⁻¹ nourseothricin. Deletion of the target gene was confirmed by PCR (for procedure see Ohm et al., 2010). Compatible monokaryons with a gene deletion were selected from spores originating from a cross of the mutant strains with wild-type strain 4-8.3 (L. G. Lugones, unpublished). Monokaryons with an inactivated fst3 gene showed no phenotype when compared to the wild type. On the other hand, Δfst3Δfst3 dikaryons showed clear differences in mushroom development compared to the wild-type. When grown from a point inoculum, mushrooms grew in the same location as in the wild type, but the number of mushrooms was increased and the size decreased (see FIG. 1). When grown as a synchronized colony (by plating out homogenized mycelium), the number of mushrooms increased (data not shown). From these data we conclude that Fst3 inhibits formation of clusters of mushrooms. This regulation may be important in a natural environment to ensure sufficient energy is available for full fruiting body development.

### Example 3

### Proof of Principle: A Knockout of fst4 (proteinID 66861) Affects Mushroom Development

[0126] A knock-out was made of the putative transcription factor gene fst4 (proteinID 66861). To this end, vector pDelcas was used as described in Ohm et al. (2010). Primers that were used to create the knock out construct are indicated in Table 2. The knock out construct called pRO191 consists of the flanking regions of the coding sequence of fst4 in between which the nourseothricin resistance cassette is situated. The phleomycin resistance cassette is present elsewhere in the construct (for details see Ohm et al., 2010). Transformation of S. commune strain H4-8 was done as described (van Peer et al., 2009). Regeneration medium contained no antibiotic, whereas selection plates contained 20 μg ml⁻¹ nourseothricin. Deletion of the target gene was confirmed by PCR (for procedure see Ohm et al., 2010). Compatible monokaryons with a gene deletion were selected from spores originating from a cross of the mutant strains with wild-type strain 4-8.3. The Δfst4 monokaryon showed no phenotypic differences when compared to the wild-type. In contrast, the Δfst4Δfst4 dikaryon did not fruit but produced more aerial hyphae when compared to the wild-type (FIG. 1). Apparently, Fst4 is involved in the switch between the vegetative phase and the reproductive phase.

TABLE 2
primers used to inactivate putative
transcription factors

| | Deletion construct (pROxxxx) |
|---|---|
| Gene | with primers used to |
| (ProteinID) | amplify flanking sequences |
| c2h2 (114363) | pRO103 |
| dC2H2UpFw | GGCCTAATAGGCCCGGATGCTTTCTCGGAGAGG |
| dC2H2UpRev | GGCCTCGCAGGCCGAGCAGATGCTTCGCTCCGG |
| dC2H2DwFw | GGCCTGCGAGGCCCCAGTCGACCTCAATTAGCC |
| dC2H2DwRev | GGCCTATTAGGCCGCCCCTCACCCGTGTACCCG |
| gat1 (255004) | pRO190 |
| dGATA1UpFw | GGCCTAATAGGCCTGGTCAAGGCATCCCGCAG |
| dGATA1UpRev | GGCCTCGCAGGCCCTTCTTCTCAAGCCCAAATG |
| dGATA1DwFw | GGCCTGCGAGGCCTACTCTCATGCGAGACCCAC |
| dGATA1DwRev | GGCCTATTAGGCCCGTGGGTTGTTGAACTTACC |
| fst4 (66861) | pRO191 |
| dFst4UpFw | GGCCTAATAGGCCACAAGCAGCAGAGGCTTGG |
| dFst4UpRev | GGCCTCGCAGGCCGATTCGGACAGTCGAG |
| dFst4DwFw | GGCCTGCGAGGCCGACTATAGGATGGTGAGCG |
| dFst4DwRev | GGCCTATTAGGCCCAAACGGTGTCGGGAACGC |
| fst3 (257422) | pRO097 |
| dFst3UpFw | GGCCTAATAGGCCCGTTTCCTAGTACACCTGTC |
| dFst3UpRev | GGCCTCGCAGGCCGGAGAACGGGGTCCAGCAGG |
| dFst3DwFw | GGCCTGCGAGGCCAGACCACCGAAGGATAGTTG |
| dFst3DwRev | GGCCTATTAGGCCTCGTTGCTATCAGGAGCGGC |
| wc2 (13988) | pRO192 |
| dWC2UpFw2 | GGCCTAATAGGCCACCGTCACGTCCATGTTCG |
| dWC2UpRev2 | GGCCTCGCAGGCCCGAAACAACAATGATTG |
| dWC2DwFw | GGCCTGCGAGGCCCTAGATGTTCGGTAATTGCC |
| dWC2DwRev | GGCCTATTAGGCCCAGCCACCCATCTCGACTTG |
| hom2 (257987) | pRO189 |
| dHom2UpFw | GGCCTAATAGGCCTTGAGATGTTGCCTTGTCG |
| dHom2UpRev | GGCCTCGCAGGCCCAAGAGCAAGCGTTGAG |
| dHom2DwFw | GGCCTGCGAGGCCCACGATCTACCCAAACAG |
| dHom2DwRev | GGCCTATTAGGCCAGATCCAACGTGAGAGCCAG |
| hom1 (257652) | pRO093 |
| dHom1UpFw2 | GGCCTAATAGGCCAGTGCTGGTGAGACTCACG |
| dHom1UpRev2 | GGCCTCGCAGGCCCGATTGGTACGAGCTGGATG |
| dHom1DwFw | GGCCTGCGAGGCCCATTCTCATATGCCTCAAAC |
| dHom1DwRev | GGCCTATTAGGCCTCGTCTCTATTCACAACCGC |
| bri1 (255701) | pDelcas-BRIGHT |
| dBrightUpFw | GGCCGAATGGGCCGTATGAAGGAAG |
| dBrighUpRev | GGCCCCGCTGGCCCTGCAAACGAAC |
| dBrightDwFw | GGCCAGCGAGGCCAGGTCCGTGATCCTTTGTG |
| dBrightDwRev | GGCCTATTAGGCCTGAAGGGCGGTAATGCTG |

### Example 4

### Proof of Principle: Knockouts of Other Putative Transcription Factors

[0127] In addition to fst3 and fst4, 6 other putative transcription factor genes have been inactivated. Inactivation followed the procedures described above using primers indicated in Table 2. These deletions also affected mushroom formation (see Table 3)

TABLE 3
Transcription factors of S. commune that have been inactivated.

| | Protein | |
|---|---|---|
| Name | ID | Phenotype knock-out |
| hom2 | 257987 | No mushrooms, radial colony growth |
| wc2 | 13988 | No mushrooms, radial colony growth |
| fst4 | 66861 | No mushrooms, normal colony morphology |
| c2h2 | 114363 | Development stops in stage I |
| fst3 | 257422 | More but smaller mushrooms |
| gat1 | 255004 | More but smaller mushrooms |
| hom1 | 257652 | More but smaller mushrooms |
| bri1 | 255701 | No mushrooms formed |

[0128] These results clearly show that with the above described method we have identified transcription factors that are involved in fruiting body development in S. commune.

### Example 5

[0129] The public protein databases of Coprinopsis cinerea and Laccaria bicolor were examined for homologs of the 8 transcription factors (Table 3) using the blastp algorithm (version 2.2.23+, using default settings). The protein sequence of the best hit was extracted from the database. Alignments were made with ClustalX (version 2.0.12, using default settings) in order to identify conserved domains in the protein sequences (Table 4; FIGS. 2-9).

TABLE 4
Domains of S. commune transcription factors that
are conserved in C. cinerea and L. bicolor.

| Tran- | | | |
|---|---|---|---|
| scrip- | | | |
| tion | Domain | Domain | |
| factor | start | stop | Domain sequence |
| Bri1 | 283 | 358 | RRKIEYVPFAREVDTFGGRDLAALEKYAE |
| | | | EARRRPIRDFNDWGNIDVDHLIMSLRSRVA |
| | | | TELSYALTTLSMLSAMR |
| C2h2 | 192 | 247 | KKHVCTTCNKRFNRPSSLRIHLNTHTGATP |
| | | | FRCPWPHCGREFNVNSNMRRHLRNHT |
| Fst3 | 593 | 716 | IAMHFAKHSAATALIDGWKSVELCQAYIL |
| | | | MSIYAVPARRWEEDRSWLYTGLAIRIATDL |
| | | | NLHQVSTAKPSSERHEREILNRTRVWLICF |
| | | | NLDRSTATQFGKPSTIKEDYIVQHAKDWY |
| | | | KKSKYN |
| Fst4 | 329 | 463 | LSPRRLALLLMVLSIGSLVDLKRPLGYLSA |
| | | | EAYHHLARASVCEIPLMEEPDFDTVHALFF |
| | | | MIWYHLIFSDNRKALGYAWNLLGFVAKL |
| | | | VQGVHRETSGSSKLIPEESERRRNIFWELLN |
| | | | LDYRMSLTLGRPPSIS |
| Gat1 | 221 | 291 | VQHTDDAASKETQYLRRRCFNCHTTEPPS |
| | | | WRRSTLNPGKIVCNKCGLYERTHLRPRPLR |
| | | | FDELRAGSKTRK |
| Hom1 | 222 | 228 | KKKRKRADANQLRVLNDVYMRTAFPSTE |
| | | | ERHQLAKQLDMSPRSVQIWFQNKRQAMR |
| | | | STNRQ |
| Hom2 | 67 | 139 | DYRTFFPYQPNEVKHRRRTTAVQLKVLEGI |
| | | | FKTETKPNAALRNKLAVQLEMTARGVQV |
| | | | WFQNRRAKEKLKASK |
| Wc2 | 27 | 83 | FTKRKRWADLLVTELADAIILVLGVPNPKI |
| | | | LYCGAAVEELLGWRDTDVIDLDLTELM |

TABLE 5
Relationship Protein ID (see (http://jgi.doe.gov/Scommune) and Protein
Domain (see Table 4) and SEQ ID NO's asused herein.

| | SEQ ID |
|---|---|
| ProteinID | NO: |
| 84275 | 1 |
| 112067 | 2 |
| 75142 | 3 |
| 255701 | 4 |
| 17463 | 5 |
| 80413 | 6 |
| 269940 | 7 |
| 68168 | 8 |
| 80935 | 9 |
| 65208 | 10 |
| 269941 | 11 |
| 81364 | 12 |
| 236086 | 13 |
| 258244 | 14 |
| 233954 | 15 |
| 81115 | 16 |
| 50846 | 17 |
| 269944 | 18 |
| 11907 | 19 |
| 13988 | 20 |
| 255004 | 21 |
| 85539 | 22 |
| 83110 | 23 |
| 16376 | 24 |
| 53446 | 25 |
| 67562 | 26 |
| 54452 | 27 |
| 86194 | 28 |
| 66861 | 29 |
| 255327 | 30 |
| 84267 | 31 |
| 84657 | 32 |
| 102836 | 33 |
| 102971 | 34 |
| 103145 | 35 |
| 105299 | 36 |
| 108072 | 37 |
| 269950 | 38 |
| 110010 | 39 |
| 110310 | 40 |
| 110595 | 41 |
| 269932 | 42 |
| 111234 | 43 |
| 269957 | 44 |
| 113625 | 45 |
| 114874 | 46 |
| 230844 | 47 |
| 233513 | 48 |
| 236631 | 49 |
| 255185 | 50 |
| 255490 | 51 |
| 255941 | 52 |
| 256135 | 53 |
| 257422 | 54 |
| 257652 | 55 |
| 114363 | 56 |
| 103949 | 57 |
| 250177 | 58 |
| 258543 | 59 |
| 85474 | 60 |
| 11542 | 61 |
| 110354 | 62 |
| 230646 | 63 |
| 110178 | 64 |
| 237000 | 65 |
| 110445 | 66 |
| 269975 | 67 |
| 256910 | 68 |
| 84085 | 69 |
| 104304 | 70 |
| 111555 | 71 |
| 258217 | 72 |
| 257931 | 73 |
| 269938 | 74 |
| 110229 | 75 |
| 112017 | 76 |
| 110458 | 77 |
| 255386 | 78 |
| 14572 | 79 |
| 81262 | 80 |
| 269939 | 81 |
| 48318 | 82 |
| 257380 | 83 |
| 112634 | 84 |
| 255183 | 85 |
| 80526 | 86 |
| 107138 | 87 |
| 236743 | 88 |
| 105290 | 89 |
| 84273 | 90 |
| 254923 | 91 |
| 71685 | 92 |
| 237374 | 93 |
| 255836 | 94 |
| 255161 | 95 |
| 62967 | 96 |
| 79748 | 97 |
| 82694 | 98 |
| 112825 | 99 |
| 257915 | 100 |
| 103232 | 101 |
| 81412 | 102 |
| 269943 | 103 |
| 102719 | 104 |
| 255207 | 105 |
| 17379 | 106 |
| 73063 | 107 |
| 104375 | 108 |
| 85886 | 109 |
| 232127 | 110 |
| 257445 | 111 |
| 104344 | 112 |
| 81107 | 113 |
| 255863 | 114 |
| 232771 | 115 |
| 233370 | 116 |
| 256320 | 117 |
| 109936 | 118 |
| 114988 | 119 |
| 111683 | 120 |
| 230584 | 121 |
| 232060 | 122 |
| 66326 | 123 |
| 78316 | 124 |
| 86018 | 125 |
| 257247 | 126 |
| 232448 | 127 |
| 232514 | 128 |
| 63699 | 129 |
| 111405 | 130 |
| 231700 | 131 |
| 256693 | 132 |
| 257455 | 133 |
| 258832 | 134 |
| 52392 | 135 |
| 257495 | 136 |
| 57298 | 137 |
| 57817 | 138 |
| 83015 | 139 |
| 269928 | 140 |
| 63410 | 141 |
| 66095 | 142 |
| 66586 | 143 |
| 73210 | 144 |
| 74309 | 145 |
| 74719 | 146 |
| 77191 | 147 |
| 78089 | 148 |
| 81726 | 149 |
| 81806 | 150 |
| 84684 | 151 |
| 269945 | 152 |
| 254988 | 153 |
| 255385 | 154 |
| 104000 | 155 |
| 269948 | 156 |
| 269949 | 157 |
| 256993 | 158 |
| 108591 | 159 |
| 109190 | 160 |
| 269952 | 161 |
| 110136 | 162 |
| 110416 | 163 |
| 250298 | 164 |
| 111623 | 165 |
| 269956 | 166 |
| 231698 | 167 |
| 234557 | 168 |
| 234560 | 169 |
| 269958 | 170 |
| 255656 | 171 |
| 255852 | 172 |
| 256706 | 173 |
| 257056 | 174 |
| 257622 | 175 |
| 257926 | 176 |
| 257987 | 177 |
| 269960 | 178 |
| 257265 | 179 |
| 269961 | 180 |
| 248401 | 181 |
| 82883 | 182 |
| 84749 | 183 |
| 110478 | 184 |
| 254870 | 185 |
| 258883 | 186 |
| 108216 | 187 |
| 108605 | 188 |
| 102516 | 189 |
| 256746 | 190 |
| 258642 | 191 |
| 112405 | 192 |
| 83895 | 193 |
| 109596 | 194 |
| 269979 | 195 |
| 77161 | 196 |
| 233354 | 197 |
| 233946 | 198 |
| 12349 | 199 |
| 250247 | 200 |
| | SEQ ID |
| Protein domain | NO: |
| Bri1 domain | 201 |
| C2h2 domain | 202 |
| Fst3 domain | 203 |
| Fst4 domain | 204 |
| Gat1 domain | 205 |
| Hom1 domain | 206 |
| Hom2 domain | 207 |
| Wc2 domain | 208 |

### REFERENCES

[0130] Altschul S F et al. (1990). J. Mol. Biol. 215:403-410.
[0131] Ashburner M et al. (2000) Nat. Genet. 25, 25-29.
[0132] Alves, A M C R et al. (2004) Appl. Environm. Microbiol. 70, 6379-6384.
[0133] Brenner S et al. (2000) Nat. Biotechnol. 18, 630-634.
[0134] Bromberg S K and Schwalb M N (1977). Can. J. Genet. Cytol. 19, 477-481.
[0135] de Jong J F et al (2006). Appl Environ Microbiol 72, 1267-1269.
[0136] Devereux J et al. (1984). Nucleic Acids Research 12: 387,
[0137] Finn, R D et al. (2008) Nucleic Acids Res. Database Issue 36,D281-D288.
[0138] Fleer R et al., 1991, Biotechnology 9:968-975
[0139] Harmsen M C et al. (1992). Curr Genet. 22, 447-454.
[0140] Hentikoff and Hentikoff (1992) Proc. Natl. Acad. Sci. USA. 89:10915-10919
[0141] Horton J S, Palmer G E, Smith W J (1999). Fungal Genet. Biol. 26, 33-47.
[0142] Koonin E V et al. (2004) Genome Biol. 5, R7.
[0143] Kues, U. (2000). Microbiol. Mol. Biol. Rev. 64, 316-353.
[0144] Munoz-Rivas A. et al (1986). Mol. Gen. Genet. 205: 103-105, erratum in Mol. Gen. Genet., (1986), 205; 576).
[0145] Murakuchi, H., and Kamada, T. (1998). Development 125, 3133-3141.
[0146] Murakuchi, H., and Kamada, T. (2000). Fungal Genet. Biol. 29, 49-59.
[0147] Murata et al (1998). Genetics 149, 1753-1761.
[0148] Needleman and Wunsch (1970) J. Mol. Biol. 48:443-453
[0149] Raper J R and Krongelb G S (1958). Mycologia 59, 707-740.
[0150] Ohm R A et al. (2010). An efficient gene deletion procedure for the mushroom-forming basidiomycete Schizophyllum commune. World Journal of Microbiology doi:10.1007/s11274-010-0356-0.
[0151] Schuren F H et al. (1994). Curr. Genet. 26: 179-183.
[0152] Springer J and Wessels J G H (1989). Mol. Gen. Genet. 219, 486-488.
[0153] Stamets P and Chilton J S (1983) Mushroom Cultivator: A Practical Guide to Growing Mushrooms at Home. Agarikon Press
[0154] Umar M H and van Griensven L J L D (1997). Mycologia 89, 274-277.
[0155] Van Griensven, L. J. L. D. (1988). The cultivation of mushrooms. Rustington, Darlington Mushroom Laboratories Ltd.
[0156] van Peer A F et al (2009). Appl Environ Microbiol 75, 1243-1247.
[0157] Wösten H A B and Wessels J G H (2006). The emergence of fruiting bodies in basidiomycetes. in The
[0158] Mycota. Part I: Growth, Differentiation and Sexuality (eds. Kues, U. & Fisher, R.) 393-414, (Springer Verlag, Berlin).

The application's sequence listing, which the Patent Office published only in electronic form, follows.

SEQUENCE LISTING (241 sequences)

SEQ ID NO: 1 - protein, 284 aa, Schizophyllum commune
MDSYDHSKPYSVDTMDPSQLNYSADMGLSEYIHFPHESPMQYADMSLPPVASSEPMDFQTLNMSNYDTNYASSATYSPARPITPLDGASISPHALAYPPSAGELSSDGMTSGRRSRGSGSPAPYSTAQRAAHRYTPMGNPATRPRVRAQRKGSLKSNDDRDSDEDDDDFQPIGPATGGVDSKRETIRRQRIESEQRRRDELREGYARLKDTLPRTPQKSSKVVLLDRAVCRIKHLEVENASLHDKAMEVQRELQRQRAINEQLLMRVAGTALPSGMPQAMPMAH

SEQ ID NO: 2 - protein, 157 aa, Schizophyllum commune
MPELPPLVPMSTDGQPADQNQPEETPEPVPITEQEVGEYREQDRFLPIANVARIMKASVPPTAKIAKDAKECVQECVSEFISFVTSEAAERCQLEKRKTVGGEDILHAMTALGLENYAETLKIHLAKLRAHQANNTGVDDNDHEIHIPPPPSTQRTP

SEQ ID NO: 3 - protein, 189 aa, Schizophyllum commune
MPPEAPIEPFVQPGQPLNDFLRSFWQRQVDAAEQETPDYRHPALPLARIKKVMKSDPDVKVIAADAPILFCKACEIFIAEITARAFIVADANKRRTLSRADIAKALSKSDQFDFLIDIVPRDDLPYAPGGGSGGGGSKQQLKTEEENRNGGEGAQGMQPGMQPGHESGVLEELESLLHDVGVPQQRTGM

SEQ ID NO: 4 - protein, 776 aa, Schizophyllum commune
MHANNFPPDAAAAAQQNPALARQIMMAQQHKRFLMTLHQFHINRGNPLPPQLTGIPSPTFNPQTTIWKQVELCPTEHGAFRVAGKDVPLLRLWQIISQAGGFNHVSAQNLWPRVIQVFDIPPEMPGTRESAAMVLKSYYNGILAPFEELHRNNKNAQQQLAQAVQPAVPDPMGAIGGAQVPNSFPDAAMSPSASRGRANASLPPSTPQASGPAPLDLPADTMVDNAPNVDSGLKRKLELEEAEMKRSRQKTEPTPDAASAVTAAPPSASGSVQGSRARARPMRRKIEYVPFAREVDTFGGRDLAALEKYAEEARRRPIRDFNDWGNIDVDHLIMSLRSRVATELSYALTTLSMLSAMRISGPNSGFQISLCPDLLDELLDLLEDTAFEGAMDTDADTLDDDTFTHRELMSHVYDEEDQPFAVLKPKQAGKPSGRGPLPPPSHAIQIIMGILRNLCAFEANCEFLAGQTRLYDCVLRLCSFRREADGSPNAASPALSLTNLIATRKEALYMLCNLAPYTRFTKKDPANPPKVALRRAKHVFQLLASFIIDDTESVPPLQHAQLWTNTPPQHYRPSGLTDIALEALTSVCQPDSNRQVLAKALPNTSLWRTFTALVHRLPVAEADFQLVSRDVWYAYTEKLLLALYSLAFFAPPATKAKLARDRSLAVRAVLMRVVHKLTRGVDAPEMRQWFTAPVRRAIETLKVLEDAADPFVVAEDTAAPTLSFGMGFGQGGESTDEEGHGLLAAYREHGLEVLLAMQAQESVPFNELDSLIRVEV

SEQ ID NO: 5 - protein, 562 aa, Schizophyllum commune
MSETTVKRIHISGITPNISHDDLKQRLSTFAKVNALDGLGATDSLGAPRRFAYATLEGPPAQITRCVAALSGATWKGARLRVGDAKPDFRERIKRENEAAEAEGERPKKRRRRTAATHAPDMDPVTPDRAEGKAGWTVTPLGRTYFSARMRPERPLPPPPGEAQQEGKKKKRARAPPVRARRRRIDMGKWGSAQLKGVFVDTSALPSPDVILGRGKAATRASPDMHSDATGTESDEEEEEEEEEEEEHLDDQDAPGDKDNEHEGAADRMSVDPVPSNPPLPLPTPAESISPPSDIAREQAKNVDFLRSLFGDTDEWGGREEVDDVALREAEARERLRPAKAAAEDNEFEIAPVSSATKSQNTPAVEETVAQTRSSSPTISEAESASSAASSEEFSSSAPETVAAPQAAGPARLKDLFAPRDEEPGFSLLSALDIDLELDEDAPFPIEPTEPSPSHASGIPFHQTYTAPAATTTATAAGPLVLDTSKPFFFPRSGRGQDVRDVARANKWDWKGAAFHQPIEGNVEEIARARWEASKLELTRDWKRRWREAARLRRRRGGGAEE

SEQ ID NO: 6 - protein, 180 aa, Schizophyllum commune
MRSAAAIAVLSLASFAAAFTVTQPSDKKGWTDCNAQTLEWKTVQTDAKNFTVVLVNQDSSVLSDPIVLAEDVDASKDSLDIDAPEGGWPSGDDFQVNLVYSKKQSDRIYAQSVMFDIKEDKDCSESSTTKSGSQTSTATSSGASSSASSGSSGDDNNGALATTAQTGLIGAVALLGAFLA

SEQ ID NO: 7 - protein, 486 aa, Schizophyllum commune
MPKREKTPDTEPDSKFLAIYQTYPANADMELEDDQIRLARWIASIIPSDYLVAIHYKPKARGMTLIEILNECRDIGKLLLGEHRWSEMLREPTEDEKERTSRIYYSIYSTTREAQKDGWKQISVLSRWFDERCFRPDEICTQPYPTPYYCGLPPEDKTNKPICRPLPVAEKPRPVQPAPRIVPGSIQYIEQSNAPTSKNARRKKKKGAASQKSLPVGASSTWDKPIVENRPKAEQIRNQLWSVGAGPKASNIIATDPDDLVDRMHGITVSDSAAHATQALLQGDDDDDDQEPGYTFHGSSSMPDDAASPDQDASGWQAVGETQIKRVVKNSCPEHAHCSPGVCEVAKQYKREMQRKQEEAERAAARKERGRRPRGEDGGHRSAFSSNATSPVRHYGSSGDTEGSDNGGEGSSAVDDLWRQPKGLAKPAQNNRGGRGRAPGRGRGQGRSNGVKGGAGGGDGAAHGSAWADPGSKKDWAAQGHKPRRH

SEQ ID NO: 8 - protein, 345 aa, Schizophyllum commune
MATDVVKGGWAPDEDERLVKAIEKHGTRWSLVAQVVQTRNSDQCAKRWTDTLNPAIDRTTWTAAQDDLLIRAVNEHGKVWTKIVKTYFPGRTGLAAKNRYNSITRFVSTSATRPRRDSAAPYERRKSVSSVTSAGNASPSSSAAPLSPINPDATSSLSSCIALKPEPSWSDQLPPLPTPSLPDPSMCAAMPRSAQSSDIFVGTKFEAMRCFPMLPNAASAYEQALQRQNMELQRRRSMQESMLSMPNDLSLGAFPPATNASLDDPFFTHAGASMLGRASMPPFPPAGLPPLDPSYFDTAPYSVPVSAPQPTLPTNLNANWSRQWDPYAAERQSQAQTNKSSNYVF

SEQ ID NO: 9 - protein, 409 aa, Schizophyllum commune
MMRMLTGTRSVKRKIHRPLLQVLCPLYVGIAHHIVAGMIDATAVVALRAQGTRRTPPPQPDPFDEDAPNPQDSEARSVFVSQLAARLTARDLGYFFEDKLGENTVMDARIVTDRISRRSKGIGYVEFRTVDLVDKALDLSGTVVMGLPIMVQLTEAERNRLHAGDGNLNLPPGVSAPHGGAMQLYVGSLHFNLTEADIKQVFEPFGELEFVDLHRDPTTGRSKGYAFVQYKRAEDARMAMEQMEGFELAGRQLKVNTVHDKGGVVRYAQTESLDDSGGGNLNAASRQALMQKLARTDSAPLLPEPVARPNIPQTMESRSVLLKNMFDPEEESGDDWDKELADDVKGECESKYGKVSAIKVEKETQGEIYVKFDAVDAARKAVQGLNGRWFGGKQVSAAFISDAIMQAHQ

SEQ ID NO: 10 - protein, 636 aa, Schizophyllum commune
MDRGQQSGSRQATYQQPPIYHHRPIQPAFNTVPQQQSGLPWTRNDQTVKQESMSEHSKDGPADDGMPSTSDFVKKLYKMLEDQSFQHVVSWGPHGDCFVVKDMNEFTKSILPRMFKHSNFASFVRQLNKYDFHKVKNTDDNTYGEHSWTFRHPDFHADRRDALENIKRKVPAQRKNTAPPAPQTHMQSQVARMEREKEDMQARMRTLERNYQDVLVELVGFQRGMAQQDGLMQNLLQYVLRNDSSAQLGSMSGLGTLGASLHQMNELSRRATGGGGGWGDVGGNADQARARMQAEMARAAGQMDGQMGQSSQMGQAPSMGQGSSMGAGPSMGPNSSMNAPPRQKTEDEAEDEVVMPSLGGSPSASLDLAPHHEGLQVYTVGHLMPRSESGYEQGQAGPSSAGDASSGSKKLRVRRSTFVPGWAVPPRVLLVDDDAVSRKLSSKFLQIFGCAIDVAVDGVSAVNKMNLEKYDLVLMDIVMPKLDGVSATSLIRKFDHMTPIISMTGNAKPNEIMTYYSSGMNDILPKPFSKEGLLDMLEKHLMHLKVIQQMSRALPQTVSENADINFGLGGWDDDGKINPLAGMGLTDEQYNAMLQNIVNGDALAGDGGFGSGDKRGREEDSDGGPDGKRPRFEVIE

SEQ ID NO: 11 - protein, 547 aa, Schizophyllum commune
MASHFHFGATDAGDADMALHTAVCDPPARIYLGPPSTSPAASGSRPSTSSSHGYPVKHSSSDTEVDSTYEDGSSLTLITATEDSFHGSASGTRTPPDMDLSHGGDDGVNGGLGIPSGMVGTSAMTTSRPGGSNNFVSKLYQMINDPKSAHFIAWTELGTSFVVSNVGEFSRSILGSHFKHNNFSSFVRQLNMYGFHKINRTPRAQRTSTDQQVWEFSHHKFLRGRPDLLDEIKRKALEPDPSIKHRVELPGEVAAQLNSMRDENRRVWEQLAVERRRAEHLIGVVGQLWDIVGKGFPGQVPPFPVELFDGNESPAILVTSPQAGDQVRYNGDQTRYSGGQGQNRYAGSEAGPRYVPPIHIPGTQSSMHSMHTLAVSPTSSPTGPEMPPYHSHAPSPLSSGAVSMNGFPYARSQQQSYSAPDSGVSLPPHGGLPPMQGMHMDMYHDGGGRAGTKRPRLAGDEGADRRMARARSDSAPLGFGYGGETVHDSGGVWEVRSRSGSEYHLDGDERQMAMGMPGMPGVHGQSVNRCPPPSGPSMLISPLSNAR

SEQ ID NO: 12 - protein, 417 aa, Schizophyllum commune
MGRRKIEIQPILHERNRSVTFLKRKNGLFKKAYELGVLCSVDIAVIVFEERPGHHTKLYQYGSRDVSEIVQRHLNFDGDKDTKGPGDFTGANTSAAANDEEDEEDEEAPDGTNPRKRPRIAGPTNIAPSPGRASGARTPSNEVASSRAPGSNTPALESSANTSLPPVPPATNVDYMQPPAYRQQGPPLHLSGSMYPPPQMSNMAPTLSSLPVSSDRHLPAPGFLNQSGGGSSKNVRPPSAYESSGNIGQRAVTMDHPPTATSSRSGATNTDANTGFIARPGSGASTGSGGADYNAGFHRTYSAPMGYGGMPPGLSASGGRFNYGGPGPGPGRRTPPSSTGGMSGPSGMSNAGGGGDRSMDWPLHGPGGGAAGGGPSGGPPGGGGGGGGAGQPPNASMNWLAFLGSGMNAKQDGSSRS

SEQ ID NO: 13 - protein, 733 aa, Schizophyllum commune
MEEEPTPLSQIIHADAMLSPLETAAAWDLFPPTQDPFPCNYGQPSPQHPQLFQYPPSSPSSFSSSATDSPGSSTSSGIRMLRLSPDTPDADQQLCVPTSQLFDFPQQASIPSSAPSPISPLEQDHQHQVTLKRSASPESASTQIMTKKRNGERVTTKDFVPPDVSGLSKREARLVKNRAAAFLSRQRKREEFEAMEVRVAELERENARLLSLAQSGSDKLLPAGIERNDAALRAEVDHLRARLAEAEARERGAGAAFSPSSRHASHDAPVKMEPLDVSFNSQTGRSSAMPSPHTTGVGLGLMQVLLCALPALLRAYGGASSGGPPPHIDLSSILTPELNWHRQGDAVVLDLDVDDHGRPRSLAANPALAAVRRLELSGSMASAVVGLGGRELAFAAGPSEGGKIRVRVCPPSSAPSDAYPSPRSSISMDGPMSASSLSSPVWPTSLDALSMPAVFNAGTSDPFFGMGQGDYGMSYPMMCPTDLGPSVYSPTESPFASALGSELHAMAAAEDPARRQMQIALKAAGEPDWGAQLGDYQVKISDQRRSDNTHLGIVAEFKHQRALRTTVSGEQGLNTLLFGGSVGVSPARPSPVESQAPEFGKQVRYACHQRTDGLISLMQNLSSPRSGQTDPRKGAQSASSSVDEEGSGWSTSTLALRLGGREAGEGQGAEQRASEERSAVAGFGAIWRPASYGPGHATRSSAARRVRAVKVSETEYGELSPEPSMISLVHGTH

SEQ ID NO: 14 - protein, 772 aa, Schizophyllum commune
MFSTATAQQGPIRQDGFESSFESASTPPLDSLNTINHPFLKFAANHDNIDFTDDLTGLISHERSTHSPAPTNTLSTSATSNSSTYQHNIFDISAPTQLSMHHNRDEFALQHREGTSPPENYSTGTRPDSAFPANFNSTLPALNSSMRYDPQPPPRFDPAAANRTGFDAGGRPFDRNSFDAARQDRVHTSPTFSDHRFDNRSFAADRFDSTGRPFDPRFDHFSESRRSDSFDQTGDGHHFGDAARFGEQEEHVNRFDPSHPGHHHALDKSWERHFTPSPDSPFAAGLAREAGRPTTASTNATSRSRSRSRPPSVGPQRTTRSRRNGSFSSAASGRIGRSDSISSLSGTSPTRPHAIVIPGKNQWGSLGSAGGLNGLNNGINGVGMGMGGYSASPESAFSLPTPDSGFPHSFSSAYGAFAGSKDGLTTPTSSSLPSLTGLPSLGGSQYHAPAAAPQQATQNKLDEKRRRRRESHNAVERRRRDNINERISELAGLIPEEMLDGVAGQGGNAGDKAEKDKAGQSPTSPTSPMLDMLKMEDGDSAEGLNAPGTVTPTPATANDSKDKPNSMKANKGMILRKSVEYIRYLQQLVNAQGARNRELEDELRGYRGNGNGNGNGQGYGSGFSNGSFGNFGNNGFETFNSGREFLTIQEEDIEMRDGERSKNEQAGNGPADDRPQDDRPRGGNGNDPTRGDSPLTAPSSSGGEEEDEDSDDEYVEGPKRARRRTGAKKGQKTPRAGDANKVNGAKGSPVLASALRRGRRGRSDETDEGMEE

SEQ ID NO: 15 - protein, 304 aa, Schizophyllum commune
MGPSRNTRQRSDKATEPTRQSARNRQPAERRAAADDAAQRDAADRAREQRRKEKRKEQRDEAEQRALVVEQDDESEKVRHLEEELARMRIERDAAVHAAEQQSTASKVTTNDPAPDSIPRPKNMNKVKISDVREKLDLAGDENKPEWLDLRQVIRDMTTAGFIDWTLNWRSQKSKKLGKIYDAVEENVPALRRFHNQWGTELLVKEFFQTHKTYKSCIKNPKSYRAKVARARAQRHLAQRRANAQDVLRAPSPPDDPFPRAEGPASMDIDEDDRMEGSSGLSYEEKNGSDSELSDIDDDDETAD

SEQ ID NO: 16 - protein, 1215 aa, Schizophyllum commune [sequence omitted]

SEQ ID NO: 17 - protein, 410 aa, Schizophyllum commune
MRWQGRLPSWACSPHSLPLIFHRAPWPVSRLLFAISPTSSLTSPPAIYAVYTSPNHPPIPNHLPTLIVTPHGQPSNILYSYLHTNFNSENYLLTPSPQGDLCVAKLFPPRKDAPGKGSASDPGHGGSPNSRVVRCEASRNLKWSIANTGVISPIYKLSLPSPDSPDLPLFQISKPNPNAAFWSMFYFAYAGHNIPPKRIEFGKIQKNPPGPNGGGTRISITGKTPEEKAVWQTLGEGNEDCVEWVVLCAALNLLDDEIMKAAEKNGPAPAPTPVSLRDPGPTPAPGAHPPPGPGGRGGPPPGRGGPPPMGPPHGAPHGGPPHGGPPGPGRPGPPPHAHSLPPGGRGFPPQGPPGGPHPHGHMGGPHPSGPPMGRGGYPPNPMRGAPGIQMPMRGGPPPRGGGPPPQARRF

SEQ ID NO: 18 - protein, 1234 aa, Schizophyllum commune
MNMFNNGAFNQQDLLLNSLNQNSQPNHGMPPLGASGFTPEQQRLFHQMQMQQQAGGNQFRPQSGAGQDLMGGSSMNEARSLSPSTALVMSALMGNAGIPARMNAQQQQLQQQQLAARGFNNNGQPTQQMLSMMGMGGGPANNRNSNPMLQAFPQGVLGASRQLDLMAAAQNQQNQNAPLHVQQMLFRQQQQQQQQQRAGLAGAGPSANLNGLRPGMGNGSTNMFPTSMDPRRTSPTHPQQNNMNGLANTMAGTANPQATLAQYNEKLQALRDSIVQMETELRQKTMQRAQGYLEISEDTLQTIATNLRIRKEHYTRLQSLVMRMRSGSIPNDGEHNLPGGSAGGPGQNGFPSQHGLGPSGSNQGAGPSSSPWMQNGGLGASFGVNGLQSGSQTSPANAAASLPQNVNAPPRSGPTPQSSLHATLGMQGTPQQSNSRLPSGSFSMSPSMSASLPFQQQSPAQNGAPFGGAGQLHPGLNGNPFPHLEKHRFEPIYNNFCSKHPDIKRDPRLFDGRPIDVYMLHVEVNREGGMNKVKANNAWPIIAARLGFAAPGPEPAKSTPDVAEQVAKCYQDCLGLFDTQLYQTMAETRRREMFMTMHNQANQATGGNNPAPNPAQLPALARLHPQQLQALVKYANLSVEHMRAQGLNASIIQLVENNRAGLQRYAMEQHAFRGSVKSGAAQNGMQQGVGSMAGPGGMPAENLALAGLQRPGLGGMGGGNIPQPQDIPIQLFVKVLDYLPLGESALQQATGLIERARVEFSNKGLQRLPNKDVAPELRGRLATIIHQTMQVAQLMDARLHRFFLLVRAENTTKSLISAFAILRKQHELLQGTQPRFVMGVEELSMTLLKMKECADLAINQGKQFIQKAHMQNPQMLAQRGLPPGPPPPPMDPPQNVPSHTLPPQPGPAGSAVPPRPPVNLQPPPIGKHKKNVSTPAASPAGGNVAPTPPPTTPAVTPAQMAASPSNVKSPKNKPATRPKPKPVRRPSKATAPTPPSTSTPATEPQTPTIGKRQREDDPAQSPINGPSPPKRAKAEEEIAAPSQLPEDKTANLESKTDQEVAACLDQMKELVQQASQGDGSSSMNANIAEAFDELLKQSISLPDASGDGSMDMPGPLDGSLGMGGVDDSLSFFDWTAYGINADAPDGSDSVAPTPDLLHSSTNTSPESAAGGDADAAHSGAGEKHEEEQVAAHLNVGIWKDIEGGSESLYHQAAAEWKWDGVMPTLDQPWAISSG

SEQ ID NO: 19 - protein, 279 aa, Schizophyllum commune
MSSDVRLSSDMRMAGDPRVPAGDLRMPPDLPLPPDTRISSPRSPTNSRVHSHSPNMPPRYRDANWEQRYMPGVMGDGPSWIDGDGSQSGSLRTSFDARVIMNTGSRSGMDAGPSRVVEDRTFKRDSPESNGLDLHDASSPTTSERSLPNASQKPQQTEKQCSHCGVKQTPLWRRDPSNFQLLCNACGLFYKQRHMHRPKVLIEADQEDDTGEDDPNAPTCSHCGTHRTSVWRRGKDGTQVCNACGVYSRLRGKERPLALKKNKIRPRTKYPKAHPGNQK

SEQ ID NO: 20 - protein, 350 aa, Schizophyllum commune
MSTVHGRYPPPLPRTSSGSNTSQLFEFTKRKRWADLLVTELADAIILVLGVPNPKILYCGAAVEELLGWRDTDVIDLDLTELMNQDDQHVFQTAFHDSVNTEQELLSYVRLKCNNTKDASHTTTAEVLFEIKGYPHYHPDRSKCWCFFATARPYPSRNTAMLNTFFDLKIENERLQQRLVELRSQQPAPGASNGVPSASPITATAANSFTSSSSYPATTSSYAASSSAYPHGPAAQSSFYGDVTSPVTRTSYDPNSMYGGTSFGAPAHASAPEEDDDGSSKKKRKKSHAGEQYVCITCGRTDSPEWRKGPLGPKTLCNACGLRWAKQQRKTDDQPAEGPGSGPGPGPSNA

SEQ ID NO: 21 - protein, 449 aa, Schizophyllum commune
MYDSSYASTYSDSSLPRTPSPLNPAAVQLPMKGALDVQEPLHYHDQSINHGLFNVVDNPHAMLPVDDNAVPSESYRPSWQNPPRGSLMQELYDGESAAHARRGMHYMGPPPMQHGGWNHHLTPAHGMQEQHHMMRRATFPYVRHDHPQNLYMQQAHMMHPPHDMYMDGGVPQDVDVYAHPHSQIKLEDEQRPMPRHMINGYPYPHPQYPYPDMGPMYHMHVQHTDDAASKETQYLRRRCFNCHTTEPPSWRRSTLNPGKIVCNKCGLYERTHLRPRPLRFDELRAGSKTRKGGRNANGKSPKTAKAVVKKESREDLEAAGMLTRRSSQSSLGASSDLDESLALNSPTPPSSGSNPGSNYNSPHLPSYPLSSATSSSRDSHSPPALIEGGIRLPNASLTDLGGGLMMSPPTSRSADHSSPLLSAPSHDNRYRSSSLSQQMGSAADYGKDA

SEQ ID NO: 22 - protein, 208 aa, Schizophyllum commune
MHYLYAPQTPGPETSLFDDVKQRPDRRRRHSRSSLSTRVASTSTSPSRRLPAADDDEFSYALASALASAMTIAKAETILEESFSNAFELPPPKRPARASARTNTSDAPSPAFVQVAAAPPAEDNATDEWQAEYEAHLRTWKAQSAQARERAEKERKRWEAIRAAERARGGRPREPSHTRAVAYPPASGVPSPSPADARDLVRGEPQKR

SEQ ID NO: 23 - protein, 262 aa, Schizophyllum commune
MPWTRTTRGSNTTQRKSARTYTSRKNNGLGMSQASWRRMVINDALEEADELEAEFQARKRAREEEEEEAPASASSASISASNASTSMSKEKENAATVASVLPPAKRQKVTRASKPTSVWTPYEGSASTTTSTRTTRSATESASATAAAAPPRYSYTAPSQHTSAIPPRHGPTATSFSSAHPTHQDMKAIPDALKPKIPVLFPEVFDPVLYAKFAAMYKAGLLPGYPPAGAGGTTAGGSAAAPAAGGAASATVPVTSQPASST

SEQ ID NO: 24 - protein, 222 aa, Schizophyllum commune
MSNLDHLTRAHQAVAAKRRAKKNQVKEILFDDAARREFLTGFHKRKVVRTDAARKKAMEKEKQARLEARREQRQILREQAAENAANVEAAYGALINGEDADELPTLGPSGRAKGKQREEFEDEETLATVTVVEDFDPDTLIHGAPDEARERQAPAAASTSKLPAKLKPAVKKTAIKKAMKPKKIKYETNAARKAQTAKQRKRHTEKAELAGGKRAQKNKKRR

SEQ ID NO: 25 - protein, 798 aa, Schizophyllum commune
MLDDRHIRDRPSLPAIGVLTGNHLDLSPPANLGTPPSPLRAPFLTAPVSQRPEFNLLVAGCSGGKSSFLRLLADTSEIASGTTQDQVAHLAKFVQTCAAPTTQLRVASLDVEPETGAPPIALGLVDTPALDARDTPAAERVLADIVRFIDTRFAEAVEDRDARRAASGDQFIHLCIYFLDPDLIVPPAAASRACRPGFPQLEPDAVLLDPSGGSPLPARPSLPRGDILAIKNLSARVNVLPVISRADVLSNARLATIKAAVRKDLADAGIGFGIFDEYAAQDTAAAADALQPELIASSRASPPTPIPRLPYALISPDIYAHSDGVQRVQPSRHDLIEQYRPSLLSRPKLLAGKYVRAYRWGYLDVLDHKHCDFMALRGAIFHHMETLRKYTRDYLFKQNVVNYRRSVHANPIAPQPPPAGSRPALAVNTGAVAQPPLAHHASMVDVGRAVEDVHLPARSLSDSLPTARALADAVPGPSTKTESRGHLRSKPRKITIACNFCRSRKLKCDGARPGCGQCEKRSHTCEYSATQRRRSGRPKAADELSDSDSVGEPSVLGEAPVMGEPSGDLDNKQIQLDKGFPPSMQDGKGFNPMQMQENGFALPRGPPGRSMFPDNELPHIETLLPRGSPPSQETRSAPGMRGMGAGGLPLMAPPARKRAATVPGKSGTGRLTSSGPKVVACDLCRSRKTKCDGGMPSCSSCARKSLPCHYANDRRQSNGAKRAPRKGTASKAPTEASGSPPAQADEDANHRPLSGLHSPPHPLKRPIDVLDTMRPPKKMKTDVSVNALAEVPPVGVGP

SEQ ID NO: 26 - protein, 978 aa, Schizophyllum commune
MSGVDFPVYLKNGEQVRVNDHIYCSPSWSQRDGTPYSIARIVAFLGPENAPSGNGDEIYHYTRVRLAWYYRPIDVSDRPSGDSRLLLATIFSEVLPINTLRGKCYVLHRDKIPDLSSYKKRPDRFYFCRLFDPYIKKEFEVIQSSDVHNLPDNIRETLCSRYEYVVAEKEVIPDLTDDIRICETCTQWCPNPESVQCARCKKYFHMGCVQPPLAAKPARGYGWTCAPCSRQHEEEVDSHDVHHSVQTRNQAKAIATRGRGRPRKDRSGEMKEELLPIKHFKGWPFRYFGLYTVAEDTLDPDDLIFPRTATRVGPKYQAVVPSAPEMQPLIAPGIEQRGGDDTIEILSAVDKFNEAQLAEYEEIKRRLAPDINLFSDVDYQTEVTHRLTDAFLAGRSLSSVEMKSPYRTEKWSTEQKLWRDADWTPQEIVAFENAIKEDGAELRAVREAVRSRTIKEVVRFYGHWKAKCLGEEHRRTRKESKPETVPTVFGDVSSAAAGQHVDEDEASTVDAPTGKNAYCGACRTRTSPVWWKAPKGLATNVLCDTCGSNWRKYADLNMRPVREEVAKEKEKEKNENGKRGTDKRDVTPAPGAKRLRPSASAASTPPASSIGSGTRCMVCHRANGGRVVQCRVCQARFHAGICGATVTPENADKWLCEICENEESEEAAINPVCLLCPRPRKDGKQKIRGPPPDSFLRACKPTEGQGWAHILCSVFVPDTCFTDTKTMRVVEGISVIPRARWVNKCVLCGVSGGAVIRCYDCTREFHVSCAYRVGHKFGFEMTPVKNSRKDPSVITSFKGDMGCMTAIVSCKEHKGLHNNMYELCDTNEHGETALQVYCQAYKQAAVNQAHGLLRKARRFDQVLGIKDVPSTNEIETEKSCIRCGTHCTPLWHPLNGDDDSDATMTDDCDKFCHRCFFESKHRQDGPTNSVIIQNGAPQNGLPEEDTTMADGDADADGEHEVSTPPGAHAADTAMAVDA

SEQ ID NO: 27 - protein, 74 aa, Schizophyllum commune
MSREADRITSAQQTLDLLHELSQLLNTQLDKETLATCVQLIESGASPEALAAVIQELRREQATLAARGVAGSLG

SEQ ID NO: 28 - protein, 540 aa, Schizophyllum commune
MVLVNNIKYACGTCIKGHRSSTCKHSDRPLFEIKRKGRPVTQCEHCRELRKTKQVHVKCVCEKEGEVGCAKSDDASIAGLSKALEQPAFPNGLPEALGASATLGVAADRTSAEPEHREEVKSSCKSGSQCDCCVPRAPKAKVKVPKPLRSSPALSVKPALAIKASPSPQHPEFPLFLSDSLALEQEMLVTDPSVLHSAHDPSIPHAARVRTHPNEYSPYGRAYDQHAHYHGHSSPIDRPSSSEHRERHPSSQPTNTMPSPTLPDDFATWFSEPSPFCQVSDGYNSNRLLDMSANNGSAESMSSAYDSAPDMGSHIDIDMNPRIVASEWIGHAPTEPPNSTYPPTLPRIEVPTFTSEDRVFWDSVNVAGMRSAPNLSLCMDFDGLGCACPPGACRCGAAECWTDSMSSLSDPMSSMPSLPDSMSEVAYSDGMPPMPDSMLSMPPDAMYHPHLSAMPDLMRSRSSSSSSSSGASSVQSFRDAFGTGGGHIALDAGNHNGVDAGSQNTLDAGGSRGVFDGGWFSQLAGCAEDFAAGRPIDEFW

SEQ ID NO: 29 - protein, 826 aa, Schizophyllum commune
MSTGRIYGLYLYGAACPAAKTPDAVRTMLTNALAPMLPPPPSPERPLKRQRRSPNGERSEYEHSTGPLGWSGEYEMRHEASTSAHDAPKTQQKDDRRKLSCKECRRLKLKCDRVFPCQSCCKRGCAEICPEGSLTSGRGSRFILANTEQLHTKIQELSDRVRNLEQALQGYNPDDPLLASELLLIKTAQEFHAAGNAPGSPTGATASSSQTQQTKEESLHTSVSNLSIASPVTPCVPTCKDDTTPIVDQNGIPQVPPGVLQLSMSFPFPWRVDMSVRQRIRNALPRREEAEAICEEARRNALWQYSLDSSETFLPNLLQYCYTMPINELSPRRLALLLMVLSIGSLVDLKRPLGYLSAEAYHHLARASVCEIPLMEEPDFDTVHALFFMIWYHLIFSDNRKALGYAWNLLGFVAKLVQGVHRETSGSSKLIPEESERRRNIFWELLNLDYRMSLTLGRPPSISLQHVTIKAPSYTAPNTFLPADEMVYHEWKNTFLQNCLCPILEYMIGKDQPGYSRVLELDHRVRESHVPPLLEHCTPASPRYIKMQRALVSSARAIALLQLHRRSFSDAMSINAARFTLRHENAPSVVATYLAANSLIDTIEDLFKWEPEISVRFLFFWFNAFSAAMTLQAFIHRVPSSSIVPHALRDLERITLLFRRASKILPFSGRTLPILDNVLQRCHKTRQAAVVPASGAPQQFCDMRLPLFAEAHPALAQFAETLQTATFYHPMEMLPAEYQTYHQHSHQPVVGHHRGTRDEDAWMPDPYNFNSNGISVEERYTGVARAFPTPFVPSSSRVLDDETFNLEHGALNPNLVLDSSIFMAYL

SEQ ID NO: 30 - protein, 904 aa, Schizophyllum commune
MSEDDRAAKAARAKALLAKRQKQKKGGAGAAGLMSPPSRSTTPALSEPPGEDEKRDVADLFGGKDDSDSSWITSMPRAPSPASGRAGSPASTSHSPRSSAVLSPSISHEKELALQRHIASLEAEKDGLLAQLRRFEGIDAHLKQVETALSQERESNQSLSEQVKRLQDERDNASRTIQETRTALEAQQSRAAALEKDLQSSQSEKETLSQSLERTKAQYDNQLSEERKKLQAAEERLKHAQSEQGKSARAYQQTSTQLDEERARARTLENKTQRLEAEITDMKQNNQQTINLLVSEKASLTAELERLEGIEAASHELREELEQERLRVASLSEEVHTADERIRDITSALSTSQGAEKELADRCRDQERQLQLAQASVAELTKESNQHKRRVRELEEQIEADDRAERLEESLKNAQNRADELEFQLTKLKQTHSTLKAERDDLSTKVHTAQQAEAEWKSKHDALQQQFDDATQQLEENASQSLSLTQEKATLQTELESMQQAIVQLQERLTQAATELTASARQLQAAQTEARNANRRAEEAEKMQQDLQAEGTSLMRSLDEMRPKLVELTGAKLELVDKIDSLERAIHAKEDTISQLEATLEDVRAEHSKAAKQLSDVTSTREKEAMSTQEMNAELQRGYTQLQEELESALESVRTLEAERAVNHQEASRRLADMSLLSQSSQELLEELETLRTELDERRNVQQEEHDIFARAQNELEALRQEVAAKDQELERLRDSLTSPSDAVAPNSLGDEVLESARQLDLSAAHQRIRSLEDALYTADARSHNLQRHIATLEQQLAGRAAVAHRAISPPTARASFSSSRGNAPTLSVISPLDEGLSPETRHKRHVSLSMLKARMESERAAAAAIDGGSRPGTPSQRRAHRPQFLDENHIFWCSACKGDLVIL

SEQ ID NO: 31 - protein, 240 aa, Schizophyllum commune
MSNSVDEISPEVIENTARQIEAIQQHQQQQQQHLHAVPHHSHTPQVAPPPPPHPHAIQDQVMHPPPQQQGPPQPEHHSGAPTSSSGRKLRRACVACHAGKTRCSESLPCQSCLKRGLGATCAYPDPDNSQSPQDASSSASAAPPFQPPPMYTTLQSNTMQQQPYYDYNGQYTGASTSTFRPNKRPRNLTEEEAAAITRNFSRGDFFVGNSAPVRIDPRLPVRLTLGEGDHVHFTVGEALV

SEQ ID NO: 32 - protein, 603 aa, Schizophyllum commune
MPSSARKNTSALQRGSACLCCRKRKLKCDGTRPVCRQCIKMNRADECEFDDRKQKSRTQKLREKLAMLEKKVRELEADTHGESSTSSGSSSGSSPHACASPDTDAIADALFTGEPTGAYDLAALDGMVFPGLVDLEAHPDLAISDQTIDLVNSVLSDPVRLNPPLGGADDATGPSSSSAPAWDQDEVLPDANRQVLLEVFLAHRHQCWFDGDISRFHHASHDRPPHPALWNAVYLLGCHYAQSPYFSESEPAFFSRALREITVALDHSDRLVDVVQASCLLAVYLYANARALEGYCHSFSAARLAVGLGLHQLPAYGDTGLIDDAEQISPIQIPPPRDADEHRDRVAAFWQVFMVDRCWSVTNGLPVALPDGESDQIRIKTPWPKAPGENSPVDWLGAGPINTLFLDDGTFDEPTAHIPALRAKSAALYERAARLASRPQHGDSWLESQVVANAVQRFITILPPFSSYEAWPPNPPYVDVELLVVHSMAQVACIHAHKDIFAMESFLASNSVMAFIRQLAESDYEFLNPVISSCWGAVARFYIRILGAMHSMVPASMPPYTIEGIHQEVSVIIHSLQRLGAYVPLASEYCKRITDEWSALAIL

SEQ ID NO: 33 - protein, 291 aa, Schizophyllum commune
MESTPTKPMIRQQRALVACTNCRQRKIKCEPSNTQSGAACKRCQKHGYTCEYKAVAEDQGQDDYPRRSHHSYSPEERTSPHSHLSSMSSYSSYSSAPFLSAPPYTQQSSTVPYPGQHYAMTRTGSDHSVGPQSAYDDFAGAYTNETPYSPCFPLGLSGGATTAFEDLRSTGRRTSSLSTSHESYFLARDNPVPWGDRPMHHAHHGEEFPPATSPMDYFASVPSYPTLPGPRSAPVAAHLSGYPCHCPTCMASSIDASAAADIGRGPDVLENREVTGAHSRSSRSASQLAYF

SEQ ID NO: 34 - protein, 500 aa, Schizophyllum commune
MSFCASASYVSIAALVYSVTVCVHRLHFHPLARVPGPLLGALTDYYVTYYDIVKDGATVDQLQKLHAIYGPVVRIGPNALHFSNPDVYHQIYTRGTSFLKDPALYRAFPDKSSFGSIDPVQAKARRDAISPLFSRRAIAKLEPFIQEKIDKLTNRLLNYHDVSKPVDLLQALRAATLDIIYSYCFGEDCYALDAPDFKHPILMGADSVNRATLIFKAFPALIYVHRFLIWLLQLLGCPAFGPGLLVNKISTQLDGLLADSKALADAPHETIFHHILPGASANKKSTAFATRRSLLDEALSLQIAGSHTVAAACYVGCFHVLNNRSVHQRLTVDLKDAIPDVTDAVRLEMVEKLPYLTAVIKEALRLSHGIVSPMLRTVNSDGVVLDGIAVPRGTTVAVGNTFVHLNPEIFPNPHTFDPERWLKEDAAALEHYLVAFSKGQRSCTGINLAWCELYLILATLFRRLDLELVNSSPASMEYSAHLVAVFHGEPIQAVVRPMSS

SEQ ID NO: 35 - protein, 215 aa, Schizophyllum commune
MADASTSYAASTAPPPNTAELSARPIEDARVRLPFPDRLWIVPLGASVLGTLIGIRRGARHASLQYRAENAHRPPRTVGGWYFYHKTKNYKVILGALRQGGRTGPLVGAIAGTYVFLEELVERAGWGDVKAIAAGLGTSAAVSAVYRLPWYTMKRTMGLGVMGGCMMQAVYMGIAWAEVQAKVERAQREAREREEEARDAAKGPDAGPDSMAVAA

SEQ ID NO: 36 - protein, 803 aa, Schizophyllum commune
MSPRSSSTSPATSRSASAPYPAPRRPSGQPKSSRQQFSACGACRMRRVRCDLKDLPSVNGSPPACSNCKERGLKCVDEFADVKAVKLLRRGRRLQQVEAIYGKVDNNAGPALGASAHRQVTIPSLQPEFFSSQFWKLFHMQRPVLDPTELAARVSAHVKGNNSLGAPGEILTLVLVVWASSFGVDERGVCEPSSVDEDPNRARTRSASTTTSAHGHKACDASTKRQGRKDRTIAMLRELLELVDMHGLLRKPSWDGCRALLLITPLLEDFIPLERNNFTEVALMQARALCCSHAASSPQSPDQTITRLRILSYAIIQDAFTNGLSGNRLVFDEIDIDTINRLSIAIGHSYSPYSPSFPSSPMGMHSPTSGQSGNGYLFMMPLHLAAVCWKINAALTSVSALRRIEDGQGIDAQSMREIWEGLDRCWEDFDGIRLSAAASEESVFDLQRFVGAWQVAIFECHNIVRESLKQVLNAGANTPHKSVPHIAYQLQDVATRRCLELLPKTLSIIKMHASHSGNHMDSSGLFRWDTGIVRDGCFFAGVLAASVKKDGADDFKLEACRLSPADLEEGVALTISALSEMNWALSKSDDREQTIRLIWQTKSSMQFSTGDGQMHYRVEAPFSSSPVFAPDAESSRPGSQGMLTVPTHVHGRPQPPPLTLPDGPIRGIASAPTTAVSADGSVWSSYSPPGTATSGTNSTSTTGMSGGGSPMFASPVSTMPVFKSDMEDPGAFFQGSSGDLDAFGVMSVDNNPASGVVAAAPFDHRGSGYMDTGVGVFTPGTMGPSPGPPDVNSFQDDHGFYHH

SEQ ID NO: 37 - protein, 925 aa, Schizophyllum commune
MSIDSSSRQPSHVLYRWGSFFVSRPQSFAAIDPSQARHPNACLALSDFAQPMRLTAEYPYAPLTPRTLDDMDDPILMPLSLLSLTAVGPHGRMHLAEDIIVQWIDLEFRLIAIRDVLLRDVDQGVLPLGYRSCAVPTSYGYRKLYSTRKSVWRRAAQSRDAFAVLIAECHFLALMNRKLLDPSGRVHVSSLDVLLTSVGTFLHDVWLTTFVNLFDKPVAGFVASVADVEASFWLARLPKATPVYICWGDSKEAAASVKRAERSPFLAALTRPSLQDIARCEDASAARDRVAPGPPRCQSNSETYDSFMRRRRNWYTASAAVVLPAHGHVGVVQAFEWIKDSRGLMRREPVPPPFFHKAMAHYLEGEKIYDASRSEWDLCWAEYQKDVPLFNQSPDDEVTGETGLKDAMLPDAQVLHAADEREASKAICLQNALERLSDNMAVAFGARYGYFTDGSSVVIDDDRRPTRKTIAWLMGEGLQCMRTLCCLVPEDVSLLRAGFRVLLCAADGDEIPTFAPSVIDIFHDSAWSVWIRDSSEAFRVCVARDETSVPVYVFKFASNPSATHWIATYDAAVALMLQRIGSSCTDSKALFRLATELGCSMLVLHGAADSKDGDASNGKETKHPAYMTGSRTGERAVLGASTRDGLAVDDIRVVAGSSSSSRSPSTSGLRFDRGSETIDNDYYAACSAESKADATGLSQVRAPRDGACEAVELTAGSSSAVSKSQAATLSSASPLPVPPSSDYRASPGVVDAESRGEAGTADTPVAAVSASSEAGAPMKRQAAGASSNAPFSTDVAEYLRQRRLHFTLQRAAAMYRRGGILGRIARDLFFAQDFLSVEYAPASSGKPLIVCTFADGTTTADEDITTEDEDILIGTYFVANNPVDRFNTKKVTFWPTELMFNTKGPYCGVWTRDAEEWYLQRRDAL

SEQ ID NO: 38 - protein, 472 aa, Schizophyllum commune
MPRPSLPVRYANSKIQHLLNSGAPLPPVKYQVLTCQGTDIIVGRMKVETPTSAGHSFVLRRFDTGAISLTTMYRAAFPDGPEDVEKSEYQWVKETHDLTGTNGSSRDTSIPRLAGTWVPPDVALELAQDYAIAPLIQIMVDSKPDPDVHYRKSAKSAANSKAASVNPPPNPPTPAAAPLRFLNGAPASPAVASPPSKRRKESSPGPSPGPLPVVTPGKTAPRRSARSRTSPSPAPTPTRLTRARTKSPPVTGVPPPTFGAAMSAVHASDAPSPAKPPSTRGRPLSKREAVVIIPAKSPVKPSSRKQNAILVKKESRVSVAGSDETAVEDTPRASRSYEKVVSTYERVETDASDEPHHDEDEGHQVMSEAMEEMHRADIQEQKQMVTDIMAAGGRNMNVDAGSSSKRAREDDEDELPKSFEPKEPETEMRLIKSNSRVGAVAPERKAAAWGTGLFVFGVGALTLLPNLASQWL

SEQ ID NO: 39 - protein, 452 aa, Schizophyllum commune
MAQTPTASSSLQTESSLNHPPPEDDGKAKKKPAKRRKVNHACLYCRRSHMTCDEGRPCQRCIKREIGHLCHDEQRPKQPEKPSYSAPAAEQRPQVQAPPAHIYPATGAPAPPAPAWPLNVPQGPFLYQPDTLGNEFSVLTDFLETLDDGTFFTPPATITPSLVSSAAPPPPVPTTQQPPPAPVALSATTTAPSATAPSESSPSASTPATASDEPKIKEEPAPVILPAATKTERFLLTAADQESGSRDERLNRVIRSKYEAGLLKPYNYVKGYARLSRWMDRNVSQASKQQILQPLSVLRPKFRAVAQSLRDIDLVFIEEAFERMLLDYDRVFSAMGVPACLWRRTGEIYKGNREFTELVGVDGYMMREGRLCIYELMAEESAKYGHVAFDSSQKAVLTSCVLRYKPNLNSATAKDGNPVSNEEGFVNCCFSFTIRRDKWGIPSMIVGNFIKC

SEQ ID NO: 40 - protein, 564 aa, Schizophyllum commune
MSRPSTPNPPPERIGSPMFPGDGRRGTRGHACLTCRQRRIKCDGRRPICAQCERHNRSEECEYTDSGPSPARVLEQNIQALEQRLQQLQSSRSGPTAEITLHDPYATATAANPPGYPRILDRASSSNWWASDEPPASVVQYLVHTFLPYAANFGFFLDESRFRSAVLPDIQAGRSSALITCMCLCAASALRVSSLLPLVPHMLSRATSQTAHALASRRPQDVMHYIQAEILLAHYYIINGRFLEARQRLSAVAAVILACGLHKTRTSRPATIGNSDLRMPCAVDPVEEGERIIAFWTIVSRDKEWTVAMGESSSLPIPSDRPESQVDTPWPLCRSDYTQGRLLPTMTSSLTVENFLRGVDGTRSPSILTVHAKAAILWERAFLLGKSYRPNMPQQRLATFVATLNSLDTIMARLARRDLPPFFGSRDLGEQRALLAAHGTVYAACIQLHRPVALANPQSGQKMLMAAKEIFSFPSRLAISEMRIVDPMMGSIWLLAAYVVAGELMRLREASRGRAGGSERAAADELSRLMHSALAIIEPVSRSIPLLGDRIDKVRQLFTAASSS

SEQ ID NO: 41 - protein, 851 aa, Schizophyllum commune
MEDHVGERLGLSANPPWTGSNVVAAAAMSMGDASTTSKVTQPSGSDHGLPSPPTLSRPFRSRKNRPCDACRRAKTRCAIPAAGPPCVECQQTRKQCTFDQLPPERKKPAKRPGSPVSGSVSPGGPSSIDKRPRVVSSASMSGQENSNGLDALIHAASREKRLAISPYPEPISLDLSTPDALEPHVITALLTDDLLPIGAKQAGPDHTQLPETSYIRQISTVGSKPQYIIFTQKPKKTQDTNHLAREALLRLDSSLQLLRPPPNERLLQDLFFAHFNSAFPLLVPHHINPNDHPCLLVKLYLTALNHTRQYRHAAKAVRRLVHNGASSFIENGAPLAPRLHSIAGAVLELSGRPVWDAEARYIALSRTIAQAQLMGLHIDPGNWAIPAWEKEHRRVLWWTLRIHDGWMSFLNSRPSHLQLDNTNVPLPALPSMLATSAPSSPSSAPSPSGPSIKAEHPDQVSPASIRSLQSFLYQCRIGALVNRLQAQVSTLTAATLITREERLRRVQDLEADAAALLDEVKLEWEELGIGVPGRSPMKPSGVACLMTTLLCFRCMLRRVSIELYIGLGSPFVPDDDTLTIFADAVDYFCLLDGYDFDSFWLCHIGHILSSVTSSLLRLSLAMAFNHQQQVQQHLQQQQQRAQAEGQPRPPIPPPSSFMTQASARTCPIVLLSRLRNAVHFARQEHDWDLADASLQRTASVAHCLQHADEYAGIVSALQGRIALGANCGLHIHQTASGSSGAESMLLGSSAGAGSVQIPGAGPMQGIDQSAWNLDLSALGLDWGYDGGFDSWAGGAPRMGMGGMGTGGMGSGMGQGMPQVMPTGGPSPTYSHSSDLRRVAPDGMHMEDGISN

SEQ ID NO: 42 - protein, 827 aa, Schizophyllum commune
MADSSEPQQQARPKQKRHRPRLSCTNCTNRRQKCDRQHPCGLCIERNVQDTCEYLSVPYARPAPGRGSGSAESSTSQGLRARVAELEQGQTELRDRNAALEQENETLRAQLVDLRQQLMHALAHAHPSPRWSSSSQTPAASDFASPMFVVGAPDEDTHPKQREEPKPPPYMRPLDDDIYSISFVWAQRSLGHVGEFIGRGSILCALHSVSSKSTARMVYADSTKSVECPIDHPELHTLLQNIPSRHILDTLVNHFFERVNDRYGVPEGWFRHTYDHMQQERLANFEQAVNPNWLALLFAILASIPEDASCLVTLRPYPHNTQVYSDQAQEACRLASAAYLKPVPAQQSLRASAADGAVVRCFAKSLMSVYLAEHGHVSEAWKLTGSAIRLAVSVGMHRDPDWPLWQVMSAEEGALRRRSWWNLVILDRLYSYVLGRPQMVRIDLSDVKLPDELPSEPGDAYMVRSGHLLRLCLIMGDAMEKCFSPSLVPGPAVYELDEKFKEWNARLPQHGDADTRHTLAIWYYAARMKLHHGFVTRGLPMQGGALEKRRTYSAEESRRQCLESASKLIDCYCSKQEQDAAVPESVFLLYEATVTVISMMAQTPEEQRSQKYERVVERAYELFQRVAGQANQANGTAQLALWTLEKLVEDNCWRVPSGPVGASDRGTAATSSPRHRGFVPHSGRDSYSQTPGSGLNMPPPPLPPPPLGHQSFESGPSYANASYEHHALASQPRWSSPASYQSPGYPPPSSYAPGSTLAGHPTPSTLHHSNSSSSLHPSSSNLPHPPITSLHPPFPSPSSLAPSSSTAPPHGSDAPPPPDVLRSYPPR

SEQ ID NO: 43 - protein, 584 aa, Schizophyllum commune
MGQRHQAWIIAQVKPHGGGKPRYRCIGGLHHQWCYGSLPLKGLIRIATLLKQKPNAEIVQEELRSIEGKYGSHLDEAPKIPNCPCRYTTFLLNLAFNADLDSDSVSGQYFSNGSLGNVLPASWGCWDGDNNDGLTIIDVTDPYNPRYCFLGGNETETEDTGRLTAQKYLEAYYDIELEDPQMRAHLQQVLDACKGFELIDVAALREAFPSDFKGPPSVKKAEEEKTAKKEVPSLTSLTLGPVVKQAVQSGELEAIEPILIQADKLPQILEALRVVQAPFPDSGLAFVSKVIEATSSFEDLKGIQLSGEQLTKVIPVDISNDVLDLSGNAVLTADGLRALLAHNSKIRRLVLFRTAISNEDMYKLLETPTLFGHIEELVHPLLISWKRDAFPATFTLQHVSDSMSFNVGGGVLSVPIMSLNNLAEGLGRLVAGLLDPQNAMSFGAGDAPFEAALSTGHIPAGKTWGERAVWCTPVRTQRAAPSSWTFVLKWASFGVGDSQYGLINTKVGADGTKAVTAHSAQSFLDALQEEGYPAPSEAVAQKWSEIFDALDKAGGQRMSVDEYKAATTGNSRQQMIARMMGLAM

SEQ ID NO: 44 - protein, 493 aa, Schizophyllum commune
MAFPPAMMHAPVYPPYCDPSGYPGPPTYYAPIYHAGAPLVRVPSHHAAPASRPAAYAPQPAAYLPRSAAYPSQSAAYLSQAPHPPPQPRYDGANQPRYDSANPFGNPTCRQYCRTAGTHELSPQDINASPSARTRQDALTALPSSAMPHGYPRVRCEIPMGDSWASKSGSPSRAPTLAGYTARCGLAGVSGRHTVNFYDVDQIAGALVRAAGSKLSADDRRPQTFVARVLGRAQVQLSVALHALLLLRARSSMFVLASVSPEQRLLAALSLAHRAGTEVGICTGCWAHIGNYCWAGEGRAWLGADAFVDGVAPFSKEAMRKHTEGLLRAIGFSVHVERAELENVALEILRSRTPEATSGRSSESRTPSVADGERNPRARLPPTYAELADRPQTAAAGARRARHGHSSSHPRPHASTDHLVYAPSVYDDAGHEPNYDGYVHTYPPSTSSSDSRSRTLSLGAGARMLSAAAQQRVGAFHHRPSPLVVYGASGYLA

SEQ ID NO: 45 - protein, 371 aa, Schizophyllum commune
MVSFTTKIEDDSPLLTLGAGWQLGTDDDMTRFSGGSFLNTSETGRMSLEFNGTGVEIFGTRGPQHGSYRVTLDGTTYTYDGSYGTRLYNQTIFSKIDLPLRQHQIDIESLEDGKILDVDYLMVTSQLDNEESTIPRRVIENTDNAFLYDPANQWLTNSSDAFSGGSSTYTKYVNASTTLTFEGEGVTLYGPVGHPFSSYRLRLDGKLTGRYNASRLSDNSQAILYHANNLDPGRHELQFLYKGFKGVHPVAIDYAEVWGAASGGNASGGDAEQAVSTSSGLSQEAYVGIGIAVVLVVLAIGAATFALPYGLVASIAADAFTYDRKGSSGCIVPASHTTYAARTSGSDTTPPSYDQAVYASPSLQHVRSLPP

SEQ ID NO: 46 - protein, 275 aa, Schizophyllum commune
MASNGTRSKAPSSKRKGGAKGGKGARGKASRSRPAASRSKTGCYTCRIRRKKCDEDRDGDGSCSTCKRLNIQCLGFGRRRPDCLKDIVAECLQRIKDHLARSPSGRAEDMLILCSELLQTTPAPAGPSSPAGPLYTPSTASTDLHTPSPWAFTEAPLDGAGPSFTMSPFSRDMTIKAEEMGTEPASNMGATFHDYPVHGGLDSWMPKGEPTTPMLSASPADPLIDALQGLGPSMENPDLLQVSGSAPEDGMLFASQGNALSRGPSFDLSSWLNDL

SEQ ID NO: 47 - protein, 452 aa, Schizophyllum commune
MPDSRARSESQDLDRDSDNESLSNQPNKPGRKKNPNGSQAARRDQNRIAQREFRLRKQQRIRDLEARVEILSGTKDEALGEMRNMLKDLMQENQTLRGLIRSLATFIGDGAGGLLPKIGWDMAEFNNFINRGETDTAYEGYQRRKKQAQEAGGSASAGQKRSMDDDGGANKRAKADSISSTGGAEKIVGGGFPPMMMPMDSGLSGNGLYSASGSRPSPQSGNNNLFPDLMRGPGTSPMFGMQGSSTTPIGGGPPLSNYNQHYMSMNIDPSLPMPSFSPPNTNTTPSVQHATPASRLQTASSQLSPDAAEDDDDPNKNEAYKLIHYHLDNYKRNGQYCLPSSLRPTLVQRTVPHESVIDRVLHPELRDRMILLRGKFDLVDCLLDYRNAVTIHGDDVLAHNNWEVGEKWLRQYYYLTDPATLAVANRWRRERGDPELSMDDLAGEGSPGGSAS

SEQ ID NO: 48 - protein, 550 aa, Schizophyllum commune
MDRRRRDQRADDDDADRVHESSLPPTLQPLMFREPQPPPPRDSASRSTYEPRDDDEPHRDEAYPASAYPAPSSSSYPLRPADSWEAAAHAQAQREQEVSRRYLPARPVIDDAREHQVPAYALHSEPHPVAGPSSIPHGSSTQYYSTPPVPAPEDPAYRARPPPPPPPRAPTQDTFEFHYNAPGYDPYRERGLYRDEPPVPSSFRPADPMPPRRHQERVPPAPPMEYLRPYTGESGWERRDSRYESYAPSYPDPPPPMEEYGPSGTYAPHRESPWQPEPARYPMPPPPSEHQYRPLPPPSELPHYSPDPYAPYYLPPEQPHRYDEPRYEERRYEERNRPMEPSRHESYTPVPSSSQSVYPSRSRPDEEMEPPPQKRPRSTEPRKTQTRKTEIACDFCRGRKLRCDGAKPVCGNCLSRSNVCTYRSSPRRRGPGKMSKAEKARRKAEATAMERDIARSSSSSSSHTTATSAYAGSILPPSSYTYGYPPSSAYMPPHGGPPLPPGPPGPTPITGPPPMTPAARRSVRTPTRPSYAEEPEEDEETERPDEWRGR

SEQ ID NO: 49 - protein, 486 aa, Schizophyllum commune
MSTIEGAQQQESKKRVASTETPAEGDHRKKRRNRTTQSCLNCHTSKRMCDRKRPACGRCTQLGLTGHCVYEVDDPAQRAESDENARLLKRVAELEGVIRELKNKPQPRRPRTDSQTSESCIALDGPPTPVTPDGLEGRSMDGSEASRTPPLSTSPCTVGSPSISSMPSPMDELVISFIGNETLGTRHPPPTFSSEDFTAQWIANDLSTLLGPRIEGNICDDPGVVPPVEEGGRGTFARPRHHTTLLSPDATRHRVGRLSQHVPKTTLVNAQTPPQVLYVTRRRALSTIAELRLTREMQARYAAEFGSVELGRKFMRVLSEKADVIGGTPHPDDPSIRDIPILGCTYHIRLWTGCLDNSRLVCWNFMSNKTGKPRLRPTNLKIYADGDKICLASIEEGCCFDLKKSEWPEGTTETFAADDGSVVDFVVGQTTLLRLQLPSRPFAGPPRIKKYREYKILPIEDNEDDSGEDEEEENGEGPNDDEEEEE

SEQ ID NO: 50 - protein, 958 aa, Schizophyllum commune
MAKGDELVNMTLPTKKKQQDDSEQFGSDIHKPLQLQRRRVWRACESCRRKKIKCDGSEPTCSQCMASGSQCTWLQTKDRAALSRHYVQELEGRLLQMETLFNQLAPVLDQIGISTNGGNLAEIQRAIPSIPAENITKAANILNNTPAQAPSAEPSPIKVEEDDVSDSFGQLAVDEYGHGRWMGGSSSMSLIQSLRQITTTPLQHQSPMEENPPESGPNKLFFPATVFFGKVRALPGPEEVEYPERELADRMVDAYFSRLHYLLPVIDKPTFMKQYVSLMDNTHDIVKHRTETAFISLVFAVFACGAPIVFPDRMDDGGMGMIYYERALILHYISHAKIQVEHVQCFTLLSSFLCAVNCLPQAWLLIGQAVRMSQDLGLHRSPRRQRNLSEVQKETHRKIFWGVYVMDRMLALSLGRPLGINDADCDVEQLVPVDDDYLPDYLMHKVAPNTRPFLMTGFILLTKLYHLAGRMLREVYSLDIVKDNGDPDKQAQLQRTVEILDTALQRWLDEIPEVFKNRSERDEHVCVGTVLLSHYYSVQMALHRNHLPVKRVQANPKLSAKSTVQAVNAARSCIHLAPSVKAVVPPSHDLAFFLQHLFSSAVILLLYAMHTPNTQAAQAAMEEAKAPLVALQSWEGVWPGAKKGRELLSELAHTAGQAMARNAMEKTPPPATVAPALAEGRRSVHISTAPPNAAAAGRAIKSRSRRNLSRDGPPSNRRLDAVSPYRNSQRARSSSRRRGLDDDELTANPLSSYYNTFPSPVSPHPSQAASPHSSPASVNLPSPAPGQQMDVGQDIPHMSMSGSFYGPPPISPSRSGSSQYEFADYGMQSIGGAQGWGNGVNGNGAGPSDGLDMFPPQSSQSGQAFNGDQYGGYNSHLTGYDDMNMGSLSTPLTAQFAEPGLPFSGLDFLRTYGNTNGSYPPARGSNADLWSSFDGAAFQYNPEMPLVYNENHTNDGPG

SEQ ID NO: 51 - protein, 426 aa, Schizophyllum commune
MPPNAQAQAKPAQNDDDARKADIALRKKKNADAQAAFRQRRANYIATLEETVTSLEQVVLQLQDSCREAQQQAHEYKQQNSRLRHELKDRDRIWRSLLDARKGPHDPHDDLPLPPNLSPIQMSASTPYAQDPAVCAPYQSSDPSYPNSYAPSDSSTASVAASMPRVPKYSYDYQDIQSTASPTFTESPSLTSPTITSQDLSYAPRYPGDDSKAALAALDSAAPYVFSNSRSISPSSTPPSSSASLAASYQFYPDANGVADHDYYRRYPHPTSAADLALHGGDASLGGPASDALRMRFGNNGTAPAPARRDSAPNGLPAPFGGSDHSSGSPRSDGDPAPNPRKRPAPDNPDSARQSLSPSPGPGPMSGTLAVIKAQAFGALRRTRTRKKTSESAARVAMDVLEARGIGMGVPKGAKRQRVDDDDGEA

SEQ ID NO: 52 - protein, 746 aa, Schizophyllum commune
MTPSATMLTTLTPQRKHRKLLKDGSGGEVWPEAVERIFVTGLEAYLKSNYATYSRGRSRWRNQFLVDHLRAHGIERTKKQVASHIQVLRNMWKGEPQFYLVAGGADDDIQPAAHPHHIHREGHRVSSISPSRGRRSSSLHRVGSPSRQPMSIPTAMGSFGSPANSGSPGALSGLPHSPSGYSPGSAHDMGSPSTIGSPGSVKREQQSPYGSPIGGASRSPPIKVEEDLAMDTGGPASVYDSEHVSMYDNVHVFTGLPAADGGLSVLPMNTIEGGAATGLPDLGLSTCSYEFKYPSQPGDAYSSRHPIDYSHNGLYSSPNNYASSQFSPQPSLVSDLSDSSMSSARFSGNMSDYQRYSLMSSTSSDAHYQSFGAYNEAPGANPSATYGALGMYNMEPSAPNGGGVLLPSGLPAPMLAPSYSGDIYKNQGPSTHAYYAQPSQPRRAPSQTGSPYAQQPHPPAASAPSAQHQPHAAASAQHQPRAAAQPASPPAAYPLVSSFVVTAPGMQALHVPAGELHAQLAPTALLPGTPLCIKVQVNVEDVALLHAFQAALTIDGLWTSGGTYLTKVYRPEGGSGKPKLIHDGSTALTVRGVERGVVHADALAFAGLDLRRGDTITQDIYVDRRPVLMVVYQVGSKAPSGASITAELGGYQLAGRQSQMRQQQAQQQQQSQQQQHSSQYPSPEQQPLTVSPSQLTASPSQTMGSPHQSNASPHQSGSLRRQPAHFDLRRVKSEFEGNSLMHALGA

SEQ ID NO: 53 - protein, 700 aa, Schizophyllum commune
MPAPTPDAFRPARLLDSENTEEEDVKPFINKSYGRSRAGTKASGACVHCKSLKVRCEFSPGASACQRCIAGNYDCLARTRKKRKPAPTHEELIQRAQSQDMEIQDLLLRFDRIREDGRIRDWMARAQPDLRHTSSHPSEFSPYEARVHRPRWVPTGDEGAAEMACLSYFAHGDANVLRAPDVVRYCELYPQDVQDLFRVFFERINPFFSILDPELHTPGNLIWSCPFLFTVVCGLACRYDDSRRHMYELAIGFARTAAGNALVNGLKSVDACQAYLLLGMYPTPKRNYADDRSWMFLGVAIRMAQELGLDRPPSLDLPVREQLNRTRVWLNCYCVDAAQAVQLGKPPMISPDDFLARTSASWWQTSPLNTPFDVHLCGYISSLRLVWEWRSKALTKEGDAVASTCDHAERLVQDMYSWQQIYEQHSVCQYRILLTPLLVSYLRLTMLATGVRQMMKKGASGLTRSCRVFKDAYNAAKTVIETMLDRLYYTRQLRYAPEDQFIYVSYAAAFLINLLRPKFRPLLSDSEQQDIVSLVNRLIDVLGSKDVALDDRHTPALHSRFLENLLAKRNLRRSESDRSSRSDSGSPGHLLAQLSDERYHTPPNRYVWPDVGQDVSPGGSLVSSGGDVSPSPSAVFRQVGDPDMDFSMNHFLRAVSQQQPVPQYTAEIPASSAIPWSGDWGLSEPQATTSWSTYAAPTWK

SEQ ID NO: 54 - protein, 1120 aa, Schizophyllum commune
MQRSGGPDSHSGAGHGASPMIGPGPSYYDPESASAQQHAQAQNYQQWIDNYGRQREDIHHLQQQQHRHHHQQRQQQQQPSPRELAYQQHTYGVPGYGVDAPPGGTGSLAHYPSAAYGQQPLPSHQQHPRQQQAQPTDMFSYFPSDVAQTYPGQFSPQDYPPMSASASVSASVVPSPTQWADADAFRGPPVGRSVSASHATGASSAPPAPTHANKRKRARKTPERAGNSADSDSDSDDDGGGRPAFTGGISVGMGGLGVKGQKQNSSRLPGACTHCKKLKMKCEFKKNENTCKRCQSGGHVCIVEGRKPRTAPNKREYLLAQIRQKDAIIESLLKQLHNPYIATPLSIASYRMATSPSDSNNKNILAWLDRLQASVQSSGTTIKEVSEANKGREMSVQSAGEKAPGAFTLDVRAIVRDEGDESDEDYSGEKGTESDDDDEDGSSDKLRNLPDMHVPLGLIANLSLSNKPKSGKAGKKNATEETTTLDEDDLDDDNVGVANETYFMPGPATDLGKRAMLIEQHSPPEILVHGLVAPEDVDKLFDIFYNKLNPFISLLDPVLHTPALTFARCPFLFTVICAISSRYYTEKSEIYPIAMHFAKHSAATALIDGWKSVELCQAYILMSIYAVPARRWEEDRSWLYTGLAIRIATDLNLHQVSTAKPSSERHEREILNRTRVWLICFNLDRSTATQFGKPSTIKEDYIVQHAKDWYKKSKYNLNASLTMRGRDMRLTLSRGGLLGHVVAHGSEQGGETYPKRLDFCTVTLKHDEHLTKYHEEWAKIFREESDHSDPSSEFRCLLLPFLVNYSRLVMFSFGFQQAYHRGIKPGDHSDQVFFTKCLDSAKAVIQNMVDKLAPSGYMRYAPDGHFIFASFASAFLLKLLRPEFSSLLAKEQENDIFDLIGRLIQTLSSPEIAIDDRHTPKLYARFLAGLLSRHRRDGATIGRLHTQPPPQQRGSSGPGGSSGPGDMPGSGSSSGFTPTDSTGGQGSTAASLFSQFTTLAGADKTVGTPVYRPEAAYGLGNAPIQFSSDFEMLGLSAGVPDEDMLATMQALKNPAWWEGMLMPGFSWPESSSPAPSSSNGHPSPGHYMQQPASPTSSYLNNVPGLHGGFNMFHAAQVPLH

SEQ ID NO: 55 - protein, 316 aa, Schizophyllum commune
MSGHHRSSDRYYSQRATPSLEHQQGYQYQHQPHGSVQASSSYQSAGYQPAGHRGYPSTYSQWPANDAQMSSTTYSNLYDYPYSASDRVSSPYGTTTTTSDRRLPPLDVSGGDRWSTMGYGGGSTTSGLETSMRSNPTSYTSSSYGGTYHGHHSSTASAASGNYAYAHGVPDSTSYTSNASIPRPSSAAVRVSAASSHHAPMSYSPPPPISPASEADQSGTVKKKRKRADANQLRVLNDVYMRTAFPSTEERHQLAKQLDMSPRSVQIWFQNKRQAMRSTNRQTPAHLMPDPAPAPPQSTAGGVTRTTSTRRGRSAY

SEQ ID NO: 56 - protein, 360 aa, Schizophyllum commune
MQTDCMPSMSLPSIHEMFPEHLMRPTPYTASPPTPQHELTHSYTTSPIISHRRLSLSSPRQTASYPYPPRVHQIQEPRSHTDRGHIHLVNDGPRSAPTAPYRIEIPPAPQSPVRSRQRSASTASHGYSLRSAARPTRSHSEDYPEEPRRDAGCSSMIFSVSGYTARDAPSAGHREDGISASDEEDMGGDSTKKHVCTTCNKRFNRPSSLRIHLNTHTGATPFRCPWPHCGREFNVNSNMRRHLRNHTAVRPGQTPPPPKPYSPPVYLHSPPQPALSPPESNEEDSDDEDEVPEPAYSQRRSSFDYESSRYEKPRDDRYGYELYRMSYSHVRAPSRSVSPASSASSFSPRLIPISSARDPY

SEQ ID NO: 57 - protein, 293 aa, Schizophyllum commune
MAVLARIATSILFVAAALPAVLAHSGNGNASNCASHEFWFSRKSCCVTRGGDSHNHGIPPRGNECPRQWYWHNSIGSCVPTQDHDQEPDCTHTSHGSGCKWSNDHGYCVPPTTTTSTTPPTTTTLTPSGGFNHGHGNGHHRGRRSLANREVSSCPKGLTACRIAGLTSDDFDCTDITTDLTACGGCPSQGEGQDCTAIEGAWNVQCSAGACEGAVHMYILSHQFLITMQSSLARLATPVRWTARAVLPFKRDDTQSHGPSMKADYYPSVYLSLPTIAKLVGLTGLLTPVRMLG

SEQ ID NO: 58 - protein, 812 aa, Schizophyllum commune
MPIAMEASSSGDAPAKAKKRRLQDSAKNPGGRCSKYVPNRLPPAHCLIFAAVSHSIHIARIMLYTETEAAEPTPERLREVERTFGMSVEDTNDFLLNTDSDSSLCDSKALVTSILDDAHAFFQSVDLISLQKAALRLAKYARSLEETAQQAPQPTNSDIAYVADEDVPDLTVADSHEEPITDELCDAADGLADRLWQLTLNWAAQGRYFGKSSNVHFIKSAMDMRDGYAGASYNHLDFEIKKRMEYWTVRPWEIETSVPTQPPLTFPDHSFLLELVDLYFKTNESWVPIMHRPTVDRDLASRRYLRDRSYGYLVLTMCALASRHSDDPRVFADRRPGSENSAGWQWWSQVEIIRRSYRSAPSLVLFLWGTSVPEDCWKLSMGIRLAQEVGAHRKRKTANAIEDELYKRVFWALVIEDIQLSSYMGRPRATTCEDIDLDPVIEAEDEYWLTPEKQPEGRIGRGVYFNQLIRIIHVIYSIKKPRLRSNMSRRDWQLRVVSCIDSALNSWRENLPTFLRWSPDETNAELRDQAMLLAAALFLAQIQLHRPFIVAPNTSQSFPSLAICANAARTCLRMMERNSKMSFTPWPHAVMAIFCSCIVLILYVLHRQQTGNAGDGEKDVKLVFEGLKVMAQYEKRWQFPGRLDVLYNLFPAGGFKFSTDIAPKGNKRAHEGDITEETPPLLTSSSASSNDGFVSRGADFPPPAAPAFGGVCDLGISEDELAYLFALPSDQPIAPSAADMPHPTAGAMPDEVWSTLGDGRLSSSMGPVTIGGDDSSTASSAGPSTFNAPGYHQNPFDVGDMGNASSSTVTGE

SEQ ID NO: 59 - protein, 735 aa, Schizophyllum commune
MSSADVAQGAIAPSVPDEILSAPTNITAVEEVNDDLLQRLPYEILTDVMMRLGSPQWVLAVARTSQYCCNTLLDEKSQGIWKANRQAVGLREPLPILTESAYAAFVFDGGPCEICKKHTDNMYTSFAIKLRLCNRTECQTEMRSNITTTNGDQMDTAIMSWTPSMEDHSWMGELTNINYWPTFRARLRTVDYHAAQQAFTIEVASHTVAAGIVAAAKSRHAKEIEQNQLAMKFAVDLQLWKKQYAAAGQAVKFSNHEFSKKFAKQEGFEYWDLCATETYKALLRHKTMVHERITDDDAKAHLFGITADLTRMRTRRDNRKAEEQLRANRATVEKHYHGYCAREVMPSWPAFCALPLIAELMKTVKEVNLAKALRNQPLRGVLEGELEAWRARAREALCAKAGLANEVPVSSLRAHPVEQVNVRFTCGKCKGVQRKYEYDESLDFAGVCAHVCPAQSGGKRKRHEDASSSFDNFVFDVKASEAMTELVRAAGLDPSRKDRAASLKAVGSELLCKSCVPPLVLHYSSVLGHAHRHEHMQIQRITSQDAMDRRSHPIVPGLTRALLHLHKPQGKLRQLSNAKEFSCRHCANGADTDGEGVACGMGCGRIFPTKRLLKKHWALHKNGGCADDPMGDAANPSTSTAAAAPATAPSATALAAPAAEGTAEPSTQTEKPKTGPRMFTFNGMRSHLAEKHQIALIRDEDYECHRDARQLKSIMQAVKEQPPAKKPSARSCVAA

SEQ ID NO: 60 - protein, 193 aa, Schizophyllum commune
MVASTTGTTNARSEAGRATSQSPVVEHSASGQQEGNTPDNLGSRQASDPTNDTLQAGISTPSLGDMSSALAAWEDPSIQGWGYGPPEPHQPSGSPGETSTGSAVLNNTSTSATLTITIFDETLYFDPPQPPVHLGPPHVCPICGRRYMRPSCLSTHMNIHSTRYSCGNQGRTLRFWHQEGAVRHRYRYQPSRT

SEQ ID NO: 61 - protein, 217 aa, Schizophyllum commune
MASNAKDTDFRRKWDTAEYAEKAKKRDAEEAERAKENEERLKQGKRPRKSAPSKDQPKPTQLAQRREHDLNLDKNLGKTMVVQNLSNRGPGQPGFYCETCQRNYKDSTGYLDHINSRAHLRALGQTTNIERSSLEQVRRRIAFLREQTRAASTQKAYDFDQRLAEIKAKQQAEREEKKKAKQQAKEAARMQLIEESGGPDDEMAKMMGFGGFGSTKK

SEQ ID NO: 62 - protein, 306 aa, Schizophyllum commune
MDVAEPGAPRSNWSSTPTINSSTPPPLSHDAIFKDYPPPPFMMPDFSAHADGPSMHPGPIPMLAYDRPPPSHGYSLPPTSTPPPPPPIPEYTTNGGPDRHGRTQAPPPHMLQDQQHSRTSSSPGPQQDPSAFGLDGGPGANHYASAGAMPRLPPILQVEKQQVTTSATQIASASRRRNEAHFVCPVPGCGSTFTRRFNLRGHLRSHTEERPFVCNFPDCNKSFARQHDCKRHQALHQSDKAHANTCQGCRKTFSRLDALNRHRKSGGCPGAGPSVDPSQVRSEGGSDCRDIIARDKQMQASAAPTV

SEQ ID NO: 63 - protein, 305 aa, Schizophyllum commune
MDFIASNVRALTRRSEDKEPERDYWVEILGDGWSRILHEVVQDSGSEGGSSYATADDHASEGTDKSKAAGASDAVKATAMSDAGEEARTSHVREAATCNTQDDADQWSIVARDDVPLIPNRNEGQTPPKRNVLRKPMNRSAERKPTDSSAEFKAADRSVEREAVDGSVQATPVERNPVHNEVPLEQRNVKRKPLTRNPVYYEVHTHVRKYECKFCKAPFSNAAALVLHFKRKHHDHFLKMKEKLKAREERLEMLEERHKRKEEREKKAEERRMKKEKKGKKVSEKRSRKALRREARRVATEERDV

SEQ ID NO: 64 - protein, 451 aa, Schizophyllum commune
MSAKAPLRKRARIGSPPPQLSYLSAKSVTPTASLIDRFPNELWYTILKSCSAADLCCLRTAHPHLRTLVDDKKMRLLKEAFRGTGLPSFSDIEARWPEYDLSWFSAAFMPTVEDNATAYILMMCGGRCSVCDAWTGAPPFSSNLCVRLCGSSDCTALMFSNAYSRREGCSEDEDLSLPTEASYWLPYLHVIGPTAQPPSRGSCVWYGLWPYLQRRDCRYLLCNIRQAFDELSAIDGDCRPSDGAPAWSLSACPQSDDIDDLLEKYGTRAIAHEAMETIFLEIAEWRQGNQVASAPIREANLHTLRTVVNDLHMDFGLIRKDPLTQRVLAAHARDLALVYPSTFLYLSPPPQSGSHEDGPIVQAEEAEATVASSEDLSDGADASAASSSRRPSRLIKRRAKPDRKARKQCKLAQARFACSECLHTQFTARSELDRHMSESHGESTSSSCCVA

SEQ ID NO: 65 - protein, 780 aa, Schizophyllum commune
MPYCKTCDRKFKDVASIQQHLRTSAAEHPICKHCDKKFTDETAYEQHMDSKHPKRYPCPTHPESIFKTPEALEDHYRGHQAHPNCYRCGKGYLNEELMLAHHDSAHPSELCEMCGRHRLIYHDQRQKHWVQSRWHPTCERCGEGFYDLASMRAHIREGCGREICQACGGTFYCEYVMGEEKLCADCDPDLPGDLKVENCYRDGTATEDADAEELVIGTAKEESNEAGNGEPSSSNAVPKLVIQTESESDGEEKWHTAPTNTPSWPATPFSARSDGKPAPLPPPSADISNMWAAGENKSAGPLPSLQLITKKDSLASRHNLPTLETQGLGGATRSTTVVDHSKKPGDPKPDDPSPNVESPSGLSALPGVSPYPATPSEMSYNGLDSREPRVRSISALYAGPSAEGGLSRPPSGGPSRPPSLRNNTFTPWPMDRRSSSNGRAKDLHIMTPIEAEPSSFDAEFSPEDLKQPTVEAKGPLFDAKGPLFDANGSQFGAHKLSSHGRQSSSHGQTTWPSAQTSSLHTTPSLPGSARAPLAFGSPPSAEPVPATISRQVSQDLPEGMRVSFYDNILAAPLPTHGEGADEDDVSPVSSPGTNISLGSLASTSSEATKAEVEVELSSKLGISSKLDVSSTVQMCSGVELRSETTTPMVMARPARVASPGRGASPLSRASPAKEFENAPKDIDSPSAIGKPHTLRRMSHLPRLAEHVKTPMRPVPSPPPPFSEVLKCRLCARNPCEEPTVTMCGHIFCNKCIVDAIISSSSCPLCSAPQLLYCIFKLRLD

SEQ ID NO: 66 - protein, 335 aa, Schizophyllum commune
MSKVFITLSIFADIFHRMGYIGLAATFCHCGWHEPTPRDALSTVPGHVCQNKFRPELEHAPRPSPLLFIAGHTLLQVDKHRPSVNLSELRPWMSTTLPSAVNFATTSFRAGESSALPSGDKGPSVFLCKHVSCGKSFHTEEERRTHEKGHVVNEKGELRCPHRGCPYASASESKVLVHVNSFHRDLAGNRCQQPGCDYIAQNPRSLAAHVRSLHGVAASPRKTPTPSPFKKSPTKAKAKRIIQLRSIQPISWPLPGPASPRTPLPKVPEDNPFVIAETSALNPSENGRVSKVSAGVVESDAFSYTPPAKSPTTPHSSRRHSFYLAPLGEEEEEEE

SEQ ID NO: 67 - protein, 1063 aa, Schizophyllum commune
MDAAEHNDQDANQQPTSNGSTMAAAVLASPNINGTGPRPSAASDSGVNKRYRPAPAKTFQCRGYGDCRMVFSRSEHLARHIRKHTGERPFSCHCGKQFSRLDNLRQHAQTVHADKQEQNERMMRDLTSLHASMVAASKAGSRGRRGAKKSAQQQDADGEADDDRDADGDADMEDADPSLNHAHIKTEQMPHSLGRGLGGGARPETSTGYEGMDFNANGFRGQDASFRGGSHSFRGFRESTSSSFLDSSQSFQARTGEQSFRGDFFRDSSRAGHSFRGQPSDFQGQQLESFRGQQFGSFRSQSGEFRSQQSGDFRSQQESVHALSSSWNASSRPGTSSRSTTGPGFPGSGSNGFPGRPATSGLPSLSSRTVSSTGLSSSLSRPTTSGGLLAGDGRPPTSGGRPTAPGFFASASSGARLPALSRPTTASGALAEAIATGQLADRLAADGLRSRDSELLIRGSASRPTTAGGTALPPLAAVVSAISGQSPGSAPGSGVALPSIGAVTGAAGGLHLPGPSGHTLPPLDGPGVSASGGVSVSGSSAVALPPLVDGGDRTLPLPLPSVSRPGTGYAGSRPGTGFAGYASRPSTAPTTLYFAGQGLGMGAQSAGFGGDAAGYGAGSNGDSAGYERDDEEGGRFSALAGLDDPSPFSFHPPTDERESLSPTGASRKCTFGSPDGPDDGATVVNQRHFANVESESRPASRRLSLMELCDNEPRPGTSGGVRPGTGLGGSVSRPGTSRRVSPGSVGRISPGNNGRSVVRPNTGSFGLSSLALDDYERGSISPNNESSAQRRFSSDGSFARDSRGRAISEHVYNGGEPIDVDEPSARGFSPSPFVSESRDVGVRAGAHSAAASADAERHVEASRRRFQPYARERVERAESEFGFGSSRRSTGAREQLYGIDAGRYALPSPSSNSSFTGSSGERRYGGHVGDSELPSSFGPSRADGHGQLLSWGSGRAASSASPPGRAMGRAPSSDDRTTVSSPVSAYSAGTAADVRMESVSPRLSGPGASSGSSPVHGGAAGYDAIRAVVSPALAAAAAARRTSSPRSSIQAGRAGVRSPPAAA

SEQ ID NO: 68 - protein, 317 aa, Schizophyllum commune
MLNEVNGGAYPPDVISRGRAGSAVAQSELAYFQDGYGASYGSARGVAEPQGPSAGEGGRRDRSKLPSGGAAPSYWSKPPSFGRAGNPAARDVVQPGSRLDGPSAEPAPLYSTIANALTPVSPDHVYAQPRSPYPKMEVASPTLSYSTPLPAAGAPDESQGQRYPIGQPYASTGPRSAIESVATTASPPPASPQEKKGPSGRPQKMHQCPVCQKWFPRPGGLQTHMNSHNNVKPYVCGFHECNLRFTVQSNARRHRRNAHGNEFAQQYEEAERRQPPKQPNITFDDPVVNSQIFLEAPRQLMWLPPNEPEEEMMGIVS

SEQ ID NO: 69 - protein, 343 aa, Schizophyllum commune
MSSQHNTPFDTFDGPFAKQQQPGFDFFSFQSPSDILAPHPDLFELELDSSLAGVNEVQLQLLAVDSNDAFNILRSDTPTCGPPSAITVSSESGYDSLSSRSESVYYGAHSAYESPHSNYGSNYSFRTDHSLEYDQRMQVDAMSEYTGAQMHANSGTMDPAASLAALPNGPQRGSGGQLERRYTKGFETRTSFSDYGSPRRSSMHPEYYAQQQQMAYNVPQIPMLNQHVEDMGNHSDPRKKYKCPACPRGFARAYNLKTHMATHDPNRLKPHVCPHHNCGRSFSRKHDLGRHLVSIHRQNGSEGPSAVAKKAIGVDKGPRGWCDDCGKGWVGSASTCECHDDAK

SEQ ID NO: 70 - protein, 137 aa, Schizophyllum commune
MGRLRRSRAHHARRDVHRAARTRVRSKDLDQIQLIDLDPKNRAKLEAQELDYEKPGLAQHYCVECAKYFETDAALHTHWRSKLHKRRCKRLAEPAYTIEEAEAAAGLGRDTRRARAVPEASAEMETDAAPAAGGSAS

SEQ ID NO: 71 - protein, 296 aa, Schizophyllum commune
MPTTQLPFEELTRLCICANLSSLDDSINLSFRPSPQDARVPQSSFPSGYQLNLETMTTATGTTLVISLSQVNQGLENQANVAASAQRPRNQNSDVLDPGTTSAFEFASAATPHEHSMRQGLPLPDPYAWADYDGLDGIYSATDGMHAHNLLDMTAMDRLLFCNDIPEFTSALQGPYTPSTSTQGDLAQQPPSPPSSSPSPSPPSSSSSSACDPPNSPSRKRKNASVVKGRSFPCTMGCGEEFSRQHDRFRHEVLKHERSCRWVCDTCHRFFGSQKNLERHVCNTKSRWVAPAKAVQ

SEQ ID NO: 72 - protein, 1015 aa, Schizophyllum commune
MAITADLCTHPAILPWGLMNASFVTISWRVDALLGTTAVGFTLETQISHVIPPLLSKRHLQAAQSLPADPLQISSIPEPSVRLPQRATLSVPAPADIPRAASPASSISSRALSDDEGPSNAHPWNGDSDTSWFDTGQSSDGSKSFFSALSQASSSTSSLAPEKVSAPSTSAAVARGKKPSTTETGQCSKCLRKECNGGYRCKKKKTPSTKGTAGGAPVTEICRDWCRGRCWKSPCKYRHGPVDDPLDGVASTEIPVAEVVTPKATEPAQNMAQPARVPPRVVLHFETNARLDDPVVELPPLSSQARTQEPAAIPDQAPRHVPSMKYTIEEYMSVKLLPGFQVDEIITGFESPTILIDNVPDNVPLKNLSHLLGTYGRVLDVSRKSKGIVFVRYAHAADATAASTALDGKDIFGAKAHVRKPVSKGDSRKLTVNDSTVRVDFELPTKVIYAGYENLVQAEIGIVTASQGVRDHIPSAEHHKGVPAVGINTVKFVGLPVNVKTDEIRSLGKVIDHMWERPNYKSSLEEVTSGLERYFARNGGVTRFALQPPPYVNGVATAWVTYSSTAEAKAACVALDGRKPACVGYTRIHARQTFSVLYDVETTLYAKQRYPINRLVTFARERGVDMAFVSKDNGSTTQVRMKAHQLQDVVDLRTELERILRGQVLRDHDKVIWHPFFTFPQGHAYIRDLEASLPGVSVITDVRRHEIRVSGPQVERREAFGRLRAKIRSLTSQQLRAIPLAGDAIGLYLDPDVVALRARFGDGGVMLDMDKRALVIRGGETVYNEALMAVRRAKQRRYTSVSSDPRVCPVCFVEATNPVTLRCGHNYCRECMHGFLMSSAENKLFPLSCLGDGGRCTEGITHYNARAVLNQFELDRLVQAAFTAHVNARPDEFHYCPTPDCKQVYRTVGKGTALQCPACLLRICSSCHSEYHGGLRCNADDGAAEFDEWMKAHGVKRCPGCKVPIERDEGCFHVTCTQCQTHICWQCMETFPGGDGIYGHMRTEHGTFGLGPIED

SEQ ID NO: 73 - protein, 287 aa, Schizophyllum commune
MPSHLAGLNEIHTPPSAADQDLLNVPDLSAQLDLWTNLAFQNVDSPVLDKLQHVEKDGSDSDETELHGVDAATAALRDGHSNVVTGTDIGSNVSRYQLQSQFDLNALLASFPFQQYPPVPPPQPLPQQQYAPPPASAQQAASISQFLALHGLAPSMGPSTPLPPAPAPTPAPEPPVKRQRTRRASVEASTPTPDLTTPLSATEDKRKRNTAASARFRQKKKEREVALESKAKELEARVTELERECEGLRRENGWLKGLVVGVTGVAAPPVMTPALSSGAKRSREDDA

SEQ ID NO: 74 - protein, 216 aa, Schizophyllum commune
MPAKYSTAPYTRDRRIRSTCRVVQEEDGEAGRRPGEAQSDGSASASSSAMTDADAGGSDVTHLCMTCGKTFSRRGALEAHINTHTGAKPHVCSFPGCQSAFAARSNLIRHHRIHGEEFAEAANNPKAETVFEAPIVNDQVVGQDHESIQWMTPNQPSRGYTRYSVPTDSPEAGPSSSVMQSTSSAVDSAQPTDISTASENDSGDAVDTVDPREIAG

SEQ ID NO: 75 - protein, 558 aa, Schizophyllum commune
MDNRRDPFYLTTDEHSNNNDQPPYPPNMAFTPGPPPAIQPPQPYTPDEEPLYVNAKQYFRILKRRVARARLEEVHRLSKQRKPYLHESRHKHAMRRPRGPGGRFLTAEEIAARDAAARDNPSNEDEGTNAGDDNEGSEAGAHSATTKKGPSSSSESAPASKSSPPSNSRKRKASASAATRPKRAAPSATTVTSPATLVSDDGVTSESPTAFNPFPESSEMYQPFSQAGSSYQQTGPGYETNFMNYAQYSRGSVEGRSAAPEGTQPTPLQRRPSSGHAAIHIPMWPSSFQGGEPVTSAFGAHSGGQDSSFMHSATHADYEGGSGADFHRRHLARISDMSSPVMSDAPRNTVPNISRAHRTSLPAVSIPSLYTPTAHMSPISASAGSSGISAPSPRMSHASSPMPPPSSLAAPSEGSPMDSPSPIEGGLVMPSDNTGAGLIHPPTMNAGQSPMLGASQSPLVRSSPMGSPHALNPLRSPTTQIGNPMNALNMSSQGGIMGPGSLGQPSPPLSTHSMQSPLSAPSPMSPFQNQQMRPPQQQMHHVPHPHAHARQHARFGYR

SEQ ID NO: 76 - protein, 963 aa, Schizophyllum commune
MRFTKPAWVIHDVANARGDQTKAKRATIYSVHVHPDGSRIATGGLDAKIRIWSTKPILNSASELSNKPPKLLCTLTMHTGPVLTVRWAHSGRWLASGSDDAIVMIWDLDPRGRGRVWGSDEVNYEGWKPLKRLPGHDSDVTDVAWSPGDRYLASVGLDSRVIIWCGFTLECLHRLDQHQGFVKGVCWDPVGEFLATQSDDRSVKIWRTSDWGLEAEVTKPFEDSPGSTFFRRLSWSPDGAHITASNATNNKGFVFIAAVITRNSWTSEISLVGHENTVEVASYNPHIFLRDPSKPVATSNICSVVALGADDRSVSVWQTKSARPLIVAKEVFERQIMDLSWSWDGFSLYAVSSDGTLAAFHFDPEELAGLAPHSVQDQYLTKFGYVPPPLPEGFSHNAPPPQMTPPPSPGRQQPAALPNINGNANPSVNGPPPSTANVNGERVNVLVAKRSQKKRNGGTLRTANALPPQPPSPSRGMGGRDHPMAPAMAGPSRTSSSSMGSASAFESASAFDNPSVYESASMRSSFFAPPEQPRDRSEWGMDTDDVRIDALDNVMASPLGMKGKRKASTPHDEAKPSARTLGGDRPVPQGQVHARQLAAGGMIATWGTEAPKLPMPRLLTYLSAEVEGTQDTFDAVNSDNDGEQPWFYSRWRMVKRDSSAAPTEVMGISRKQTMWLDYLPSPALLLQATPFYCAVAMVDGSVNVYTHTGRRLMPTIALGSPAAFMDGYRHALMVITAAGQVYSWDVKSGKAFFPPVSVTPVLQPDQNIVAASVRHNGVPVLNTSAGTAYAHDPSLSTWVKVSERWWSEGSNAWSGRQRSNTQHAIRGPMAAIESSISVLDESAAVKPRPQWWESALTLGHLETRMLSTRLLDSPQEYKQALLVYAKRIADEGFRGKAEELAKELFGPIYWRPGRNDTSWSPTVLGLAKRDLLKEVLSIFVRSRTLSKLGMDYQDMLKKSISEE

SEQ ID NO: 77 - protein, 1090 aa, Schizophyllum commune
MSSSSATASELRSPSPRTPAPSAAHDTATAVPSEFWFASPKLRMSEMPWAGADGVSAYPQKVDDQSMLRLDELLEENAYDEPSQAGSDMASVQPSSTASSTPAPAPTPMDMVPVLTSYSPESNFLTAPAAPLTSTKPVPPPAPLPRRFDPNMFNQKVVYPPKEACFNLPVMFPSIPESGTKSRVETQIRVTMDLADGTATSESRRYDRVGTWKWLRLPAGTATKKPTRKQGKVEADPQDTLYLTANAKRVAKKIAARVKPQKSDGDAMDDKTQEDTTSILQFNCADTIEFSNGSVVLPIRITCYCRHHREKVGFRLNFSLVDHVGRLVGIGASPPIMITDDHKTASASSARHGDAMNGYPVMDSDWSQGGADQALKRKRRLADASAKKKPYDSAGKPERQARQSSVVSAPSPASSTSSVPLTRSPSPPSGLSYPSSEPPSHSQVPSLQNSSHESESSPDGPSTPLDYSPDIQMLSAVLQEETNPMLTPTTNGLQQTSMVSSPIDSYPFMYFGQAPAAPPALQIPTIHRLIPNTGPTHGGIEVTVLGANFHANVALHCVFGDVVASSTQRWSENTLVCILPPRATPGVVAVWIDGFPKADDPSVMPTSLFTYSDESDRALMELALQVVGLKMTGKIEDAKNVAMRIVGNTGDGSDQPTGTAPNSMQLATRELRPFLLQQVGENADFEKVITNFLSVMNTPVEHASAAKVSIPDALAYTTASGQTLLHLAAFLKYAGLTQFLVDHGADIDARDRNGYTSLHVAALVGSKEVAACLLNAGADREIVNALGKTAEEVAADGFFDDIIRTESPETVRYESEEEAHWGDAEEESEDEHLLRRRRQTRRRPSGHSTPVKKHSMARLTEDRPASRAGKQEKLPEKLPGVPDDKQAASLVEMIHKTFFPQLPLPQLPNFPQLPGVLQNIPVFPVYVPMMPNWAQLGRGGGNGEAEPAGVGANAVKAAQDFRSQCDKWLAQVLQLQQAQQQQQQAEEDIAPPAYTPRRVVENGPEQAEGSRSRRRAEYDIHQVSAKEVDSYGYQPTARQQQKLQKKQDRMLVLFWLPILFMSIIWGMFTGVQFAWQMFTASLPLPSVLRH

SEQ ID NO: 78 - protein, 872 aa, Schizophyllum commune
MMDIFNRPPSIAEDTLHYTIYPPPGSTDKAAATTFAACIQELVDQLLPDYFLWHRDPFEVKVAANPDVSGSWMLEGRMRVGDSVDDEWCTVWLLREITARWDVAISVYDSDGEFLLIEAAEALPAWVKPSNTENRVWLYESHLHFIPLAHVSPPSKHRRRRKLPGAPDSDDEGDLNTGLEEDDWIAVDDALATLRDPALDTLAPPEVESIVWQRISGYPAAFRQHVQFTKAYLPQDVARALAVNPVLVQRAVETFYTRDAIQLRYAHKMARFPPQTSVMTTVRMTRTAYAQLVGQQFFPPKVFGQWKEPEGSNELRWKDVGMKIAVGFEILFQESKARLNHVKQKGETSLEASKDALRRTPDYVKYIQNLTSAGYFRGELEGSQLWKDLESKAAAVYLEARRDDAAGRQSFAEQVQAALEAAPEGAVPSADAPEDSDDWLNVNADSFDAMLEERMGKPSQQMKDPNAMDVDPKDGQAAQQKAMEDKVANDEAKKLQDLANKVENFVEGEGDLEGARFEDEAFSDEDFDDNDSDEEMPPDPRSAEEKRAFMDNLVAPLEQADYGKMPASFHANSQRVAPNKEDSPEEIQTEGAAQAKASEKKVPERVPRPPIIMRNTYEGVDSDDETDSDEDMRPDSEDEEDQPQVVGDVEIDMGEEEDEFLEFARNALGISGEHWDSIIEDRKARGAFVPSSEKSKTARKEKREDVPRNVPEGHEPRQPEPGPRPNTNPNLDSFEAVMQAMDAELAKKRTAQGAKPPPTTEDLAQKAKEKGKARADATMASESQPPPRDKGKGKAKAVESEDEDENIEAEMDAELKALLESAEGEEGENMPMDYNLIKNFLESFKNQAGLSGPVSNLAGRLQPGWKLPRDEA

SEQ ID NO: 79 - protein, 1313 aa, Schizophyllum commune
MDISDLNFKPCVCGYQICRFCWHHIKENLNKRCPACRRVYTDEGVEFKPLAASDHKRLTQQKKQRERERKDLEALGRRHLANVRVVQRNVVYVVGIGPRFAKEELIPTLRSSEYFGQYGKISKILLVKRTPSGGRAPVVGLYVTYHRREDAARAIAAVDGAPSPGGGKEVMRASYGTTKYCMSFLRGATCTDHACMNLHEWGDEKDCFTKEDLTTLKHTMKATESRSRKPDQVDTGGLPRAAAWGSKPAVTPAPIPTLSNRDSPTPAAAAAMAAAASTSSHRATRRGARGRGTSAKEATKEPTPTSSSTATETRPGRKASKAMSTTSSRPQTPVQVYQTPTAPAAEDKATKKVKESSPGPSHSPAPSSSAAPESEQGSAPTDARPPSPPKEAPAEPSALPQTVPDVPPGLPAVPPGLSAPPGLPSPRPPRPDTASPQTPLLAPQTGYTVSNAARALIDDVRFRRDMAFAPVAAFPDFDRTLEALKPSESGGFSFTFDPKLAEQTEDFELPTLEMEAEMPFHGSYLDAFPALRTGASPSFMGPPGLAYPHNPSRAIYDPLAIRPPMTATPMERQSTGGSSYTGSFNPFADGGDSSPRRSNSSALDDDSVRKVSRFGFARGRQSSSTNSPLHAPSPLSAANSESPILRGASADLSQQQQQWAAMQARHDMGYGTTPAVPSPLVQQAQPQQYAQQQHAQMGRFQPFDTNLSEAQLRDFIQSSRNRDVAPPPGMRNGNAAQGPMYKSQAFNDPAIMTARFASPAPRSDYSQSSLAFGPPPGLSFPPVNVQNTPANVMEAANSHEPPPPTLDPTDFPELASTTATQAAPPQDKAAATPPETAAEPVLDAKAEKKAAKKAAAAERAAERQRIAQEKAAVKAAEKARVAAEKEKAAAEKAKKEQEEKGRLEQEKAAKAAERERARAEKEQQAKLERDRQAQVQKEREAQAEKERAAKAKKAAADAAKAEAKAKSQAEKDKAKANVEAAKPKPEPAQSSVAEVHAPILSKKPKKNKPVVTPRPVKANRDNSEQGANDDASVPSHSHLPSKDSVATSMSSDSRAESVERDLPVTIQDLMDDIHLWRPELDLPTHPFFDMSKINPTAKMPSEYAPLVRALSALSSAGESGVSLPSGVPPDSINGAVESFKTLLDTLTQTIGDLLKLLPRATWDDNTSFDGVLRDMLKGDDFADDAGGDDPETDDEVGTLTSALERRARWMEIQLSKLEELHRDINTAAVRAVLAFNRKGYDLRRGNGASVSDMLREFDTLGYAEENGKLRPLRADELEKKAAVAKEAAQVAEADLREMMEKMQALKPFYDYEL

SEQ ID NO: 80 - protein, 1935 aa, Schizophyllum commune
MSLCTTPSFDHADLTPNGIAKLMRNLLSDPPRDSPVLDFQQRQALIVASQSKYGREVVAPILYNILPQLSLPPGATLVQTLMQLGPDVTNDPDVVRAIFARFGITDAAPPSDNQVVELIQTLGRLAAEGSTMCDVGAVVRALSSYPVQLDWPAVIRSFDWPDRLGVDTATLKLLIAVLLNSPRDAHPHAVTGFWTVWNNSLYQLRLLDALLSLPADTFNFVSLPGHRIVTVDDVSIASPTIKSLAANVQGHTWNSLDLFQVLVRLADSDSPDIKGCIRDMLDKAIKISAELVHMGLLQVPNANWNEIRLEYSRKLLAMFLGGHPNHQLVFMRIWQIQPSYLTDAFRDFYEENPQNITRILDVAQDLKILEALLEVRPFTFALDVAALASRREYLNLDKWLGDKVAAHGTEFLRSIADFLKEKMESEKLTRITDPPVESRTMPINPSTVAIILRVIRGSSHLMEQADVDYALDVQNMCFQVYPRLMNLAPGADVESGLAVIQYPQDIENEVDLIYKRMYDENISIDEVITMLQQLRTSSNPRDQEVFSCMIHFLFDEYRFFQSFYPDRELAMTGYLFGSIIQHDLLDYMPLGIAVRYVIDALNCPPDKNLFRFGVQALSRFESRLPEWQPLCAELLKNQHLLEARPDLAITLQRALAMGPDADLTELRTPGMGGYAEPAPVFLAIQPDAVDEEIETPSEELSDKILFIVNNLAPSNFDTKLVDMKQSFSDEYARWFANYLVDQRISTEPNNHSLYLRFLDALNRSSLNKYILHETFVKAAALLNSEKTVQSSTERSILKNVGSWLGTITLARDRPIKHKNLSFKDLLMEGYDSGRLIVAIPFVCKTLEPAAQSKVFRPPNPWLMAVISLLAELYHFAELKLNLKFEIEVLCKSLDIDLDTVEAAVIMRNRPMSDVGPAMPEYPGDIDALPIGGYDAAMLGEPPVMPLTEMRQVGTQIEQILTTLAQHVQISSTLSFMLGNPAFKRAVQLAVDRAVREIILPVVDRSVTIAGISTRELVAKDFATEANEEKMRKAAHSMAAKLAGSLAMVTCKEPLRTNLAQHLRQYLAEHGFSDIAAVDNHIMDLALDNLDNACSAIERAAMERAISDVDEGFAPAYEMRIHHRETRSGPFWDSSNPVHSLTTNLPDILRLHKNGVLPVQLNVYEDFTADHKRRTSRPSSTMPFNATGAYPGPATPAPLSLTAQAPSNEAVMERFGVLIRDLDNVLVQLPIQSLALLPPNHDVRHLVRQIMLNAQESDRRQAPLQMSQKIVQLLYKAPTQLGREVYVALLDQLCRHFEETGKEAINWLIYAEDERKYNIPVTVTLLRSRLFDLAVYEQQLAKFLFTDPRPSLINFVIGLIRECLTADPPIATQSQFPYCIEVLSQIAQSDKATDEVVHFMDDLRGVRRPSLPATPDIIARQPSTKPESDQLREAGFWFQSWVQIYHRSPNPEKSFVGFITQVLKSGVLNIDEASQLFFRVCAETSVNHYAKAVAVGNYASAYSYVDAMSKLVVFIIKYHGDPTGVNADQAKVHYFKKVLSILILVLAYFHEEQEPFQQKPFFRLFSSLLNDLNSMEASLGTVYFPLLVVFCETLSGLQPIYFPGFAFSWMGLISHRLLMPKLLLSENREGWAIMQKLLIALFKFLAPFLKDSELSVPARDMYRGALRILLVLLHDFPDFLSEYYFSLCDVIPYRCIQLRNIVLSGFPQTMVLPDPHLRGMKPEVIVEMMGPIPPILSDFAAGLKGGDLKAYLDQYLLGRGSTSFLPSLKERLRISSPVEGLTETYNLSLLNALVMYIGVSSVAQAKARNGTALFAPSDPGVVALQYLANSLDAEGQFHLITSMTLHLRYPNAHTYWFCSLLLHLFTEVEDEKFQEIMTRVLLERFMVHRPHPWGAVMTFVELLRNPKYNFWSKEFINVAPEVSMLLESVARNIYPQ

SEQ ID NO: 81 - protein, 222 aa, Schizophyllum commune
MTADARRPSIGSPRRSLDGARPPAPTSPPSASASTHSAPTPPYYILLSHSGVLAHAPITYHYADDPALALLPESPGEHVVLLDWTLTEVTGTANASPSGATAGSTSGATTAGSTSGAATASSATPLVSPSASTPSARIAHSESTIKPDDLVMGERVTAQSLSPSLAVTGVRVEDVQSHRMYVVETTDGAGCAPSADMSAEALVATFKQRNAALQQVLDYTSL

SEQ ID NO: 82 - protein, 291 aa, Schizophyllum commune
MRYAVLVTGPAGAGKTTFSNSFITHLTASKRTAHLVNLDPAVNPASFEYEPAIDIKDLVSLEDVMSELNYGPNGGLVYCFEYLLENMDWLDEELGGYDDDYLIFDCPGQIELYTHHPFLPTLVKHLQQMGIRTSAVYLIESQFMEDKYKFFSGVLSAMSAMVNLEIPWINIMSKMDLVTSQHKKNEEGFEEPRNARQSLLLGRYLDPDPMLLASRRGLEGKTENPKFHALNQAIVQLIEEHPLVSFLPLDLTDTESLEMVVSHIDHTMQYGEDEEPKEPHDLDEGDFAELE

SEQ ID NO: 83 - protein, 627 aa, Schizophyllum commune
MSTTDPSSSSSTAMSTQPISFSKDHSSSASQDYPMGSASIGSYNGSNGSFNPASYARHYLGSPLSWQPASSFGGRIFASGSPTAQLLVSSFEARNGKMPSSVESDRESLMNALNVFDRDSELCRNYTCCGLHLTDLHALLEHFEEVHIIANAAAAPHISVPFNPQPGPQQQQQQPSYFPQSQQQQQQQAYPTPFDPDDMDLDSTPAPSESSSPRSGSGGSTPPDTPVSTPLDPYGQYSYSNPYSSPPSPAPFTGKMHTSFYGFPTAPASGTQAHDGMRTNDTAAGASCVPPALLFSANPPAAAPASNAEQTPASAPSTPTVSASAAAPPPPTVPRPVVRASAQAPPPGGEASTSSVKANSVANVLSTISSKPFKCPKPNCNKSYKQANGLKYHMTHGSCNFAPAKEVEHVKDLLLERRKQQQAQQGGNANMQLSTSPSLEGLTEDDLLSLSREAEKRLRPFACGVGDCQRRYKNMNGLRYHYQHSGDHGAIGLRMLASGVHDCLSQNGSGRRSAHASAASTRAGTPSAASTTSTSTIHVQTSGGMQSPSGMQSPSGMQSPGGMQSPSGLSQGANGMVATQVFSPQHTPNSSAFSQTFANAPYLGYNAQAQSQPMYAQQQPQQWTMQQ

SEQ ID NO: 84 - protein, 133 aa, Schizophyllum commune
MPPRAAANGRGVYGAHSSSNGARASSSTNGAVNANGATKPPMDAVEHELLRRLLASPEWGAIRAALHARLNEAGWVDELYIRGTARTANSLTSVTVQDLLDHLGPHAHAAVPAHVKQEIMGMIRAFLDRQVAS

SEQ ID NO: 85 - protein, 304 aa, Schizophyllum commune
MLSPILFTAVLSLLSGPSMVEGRSHWFKRDVPVPAPSAPAALIARAASVGSFGSCTKPEISFNTGFDGRTETSFRPINRRSYDRGSALNIATVTKVICDTLTTCGADQTALDNCAKAAAAAKQQPEGTGAQADAFNAVFGLKTNFSAIKAVAPSGGSTSSGNSGSGSSATTTAAASAATTQAASSSSGNLGGASFGSCSVPQIEFAAGFDGRRETSFQPTDKTSYSHGSAQAIDIISQFVCDQLTNSCKANQAAKDLCQTARSAADGKTAKTGAQADAFNAVFGITTNFASVQPIDDQGRPVNL

SEQ ID NO: 86 - protein, 512 aa, Schizophyllum commune
MSSTSASPPPPQENNGRRPAPRPTVRKQTRSDFALEPNPFEQSFSATPNHSNVRQDDRNDRGASQQPSLGPSSNDSDQKPPSHTQSPKPTLPPLAALASPSDPSYYFNNPALANSLRAGPLSPAMLAGPQAENQPPQLQFDPVFRTGLTPRTGLTPRTGLTPGTGLTPFVGGPTTPNTQAFLAYLNNTQPNPTMTPNTLNAINGVLNAPQPQSQQETQHSMQQPSENGYLAPNAVSTAANTAANGLFLLSQAHQELTKREEQARQHGSTTAPANVMGGQQQVQLNGADNNHNANNGNGRRGTKRKQSGDSQAPSEGKKTRQSTRRRAQVQHDDMGDDDDDDDDEEDVKPKASGNSRGNKKPETEEEKRRNFLERNRQAALKCRQRKKAWLASLQAKVEFLQTENERLTSALVASREEISRLSALVGGAGVIGGGIPAGAPGVSGVPVASVGAPVAAGGPAPIGMPIAGSAVPPPAAPQPKPGDSQPVSMSVPVPVGIKERGESRQSDRGYGY

SEQ ID NO: 87 - protein, 756 aa, Schizophyllum commune
MSLFKKKGPKPAFKPRLSEVAADDTVKTAGDEDGAGAESPSAIATKLKKQAKKAKVKTPLSFGAEEQESEGTEFKVKKSKLSQKLSHGNKSALPPNLDQASITPQSSAPKYDQNYLNELKANTPTARPTFAADVDPEMAMDVDSTDMAVSVIDVDALDEPVEPAPLIPTESTVKAAKERRERSRKTGQPADEDFISLSLVQRETEYQGPHPTSRLMREEDDLGEGDDEFAEYTSAKDRIALGKKSRKAEAAKRREDIQELIADAEEEDEEAMEWEQEQIRRGGQLPTDVPGKPAKAVYKPAPIPPSTPIPTLAPALARLTQQLSQLTASHASTTSALNAVARERDEIEEREKEMREMVERAEAKRAWFDEFREWVESVAGFLDEKYPALERVEEDQLVLLKERSGIIAKRRQEEDIDDLATFLGPIPQTTEEPSAKSDRQSRRTTRLTRRQRRHIRDTSIQNDEEGYSTDSSLPEEDANAYDDAVASLKKSRREVLADVRAEEFRDPGRGRWGSWREHYADTYVGAWGGLGVVSAWEFWVRLEMADWDPVENSRSLDAFKWYKGLYEYARPGEGEVESRDLGPDGDLVSSMITTAVIPRLAKVLEGGAFDAYSEKHVRRVIDLAEEVEASIEPDSIKLQILQKAVITVFQRAVASAEGLLVQYKAHGYSRPFDPEAIPARRRYIARHVKLLQNMLRWRRYTEERFGVGALVERLVEGVILYAAEGGWEVGGADLAGKVRDMLPKELVSAGLRARLG

SEQ ID NO: 88 - protein, 485 aa, Schizophyllum commune
MDRALLEPPMSESSSSSSSAGVSPSPPPDSENKEVFESIYKGRKSWKTTKNGEMVWPPNLEAALIEGLELYVPDDSRETRLLGRFPMRNRFISDHIFKKTGQRRTPKQVGSRLQQLRDTCAGKKLQGLLAPCKPPPRPRPRTRAVDSFYTNGFRSDSGSPPCSDASSPPVTPTDGAFADHQRLGGAAPVIYIDVLPKGSFSPYDVAGGGAPPPCNCCSTSPCTNTFGPRHSPRPIQWIDPTITFVSPRIIGHVLTSPDTAAESRYIVRHHGRTIFVESASLTLKDLPEDQNDSGGFLYSTPFVPGFWSTIVQAPDPREYSVTHQVLEDVDDDGALPLLFHSMYRFRYPIEEHLAGAYSQQESWSAPKPTMEDMNPHIDPSAMLPMDSAPTSTFFTGLNPYSNAVGGEAYSWSSHPSSAPEVPMFYAGGGGFDMQASATAHLNDPSRYSSDDATGHIAPVLSDLIWYHSGEWPILFPALCELAFPA

SEQ ID NO: 89 - protein, 784 aa, Schizophyllum commune
MSGLPPRPDGAVPPPPGPRRETGGRFRGRDDRPPRGRGRGRGGDRAYNPRYARDSYPANDSFRDEYPERGDRGWQDNSRNRGYGRPYPESRPPRREPERDTYYAGAARGYDDRRDPYPSTSRDFPPPRGRYDRETSPRRDVYDRRPDYRRRTPSPRRGAYPPESPSMSRGRYPPDYERPSSRSSSRSRFTESPVVPKLQRESYDRPTTDNDELEAGQLISEPEPPSPPPPLIHRISSPRRSSPPPPPSRLPGRRRQPRRWDAPGPGRRRDASPPTQPRFRGNWQPIPTDRARTPSPPPSEEPKEEDIEMAPPPSAAEPQPSYPEAIPAEVQPEPAPAPGPPVPANHGDIVKQAYGNMPTPVIVPASAPSMPAPKKASWAKAAMVPANVHIVSTPAASTSQSAVTASQSAPMASQPAPVPPPPVAPTAAPTRTEPKDEPMEVDEVPAKRPTPHVPSPIPEIKSPELKIESPAEPQASHVGQPTPAQASPATPNLAHAPPPRDIKGKGRLGAPPSQPRGFTLPTEPRSMAGHANDSRGQTHPIPTGPRLNRNASLSTSTSGPSSLPAKPDSLPPTPVLPSPAAASPLARDSPAVAATPAVSLPPTPATSTPVAATLATPMPTGVMGSPSLGVAGSSDSPAILPPGGIKRELSTASSAPPEAPANAAEVKAEAEDPHHFRVRAYVPHHERQALARKRLKVANYEEPRTDLDALYDERQSFYAQLRSFQHAVARKNSEYAASAAATGRLLLEYELAGNEVRYAQMRHAMAEEQTELAKRGCLGVDYGK

SEQ ID NO: 90 - protein, 321 aa, Schizophyllum commune
MDPRHSQEHLPQPDQHAMNAGYGYYQHDQQQPPPQDSPYAMYSQPMHSGMSATMSPQMSPQMSYQVPQHQQAYQPIGIIPAQQYHQSAAYASPPHVSGQLPAGSPPPPSPDMYDPLSPPISGSESGTDASSRGTSLVHRHHIRYHPTPSPSSSSGRRSLRRSHDSDEDDNMGVSFPIENLAHTRKEATRRQRIEAEQRRRDDLRDGYARLKDSLPVSNQKSSKVMLLERAVNRIRELETENQEYQRRLALAENEVTRLRALNEKITLGSQDTPSPTPANAMHDARPLSPPPDAPPIQTMAPTNMRPPPSEGSTSSMSDNGY

SEQ ID NO: 91 - protein, 517 aa, Schizophyllum commune
MQNGLTSAHDQPSSSRVTPLAPLEYLQNQRRGSITDPSLHAAAVTASPKQAYQSIRYPDHSQSDPRNMSEPRPAPSYVFGDATPRDDRQQDQHPSQDPRSKTSTPSEGSRGDQQASQSRPDYPSRRPSAADAHPPQGTKRKMSGDRSPHPGNGEIDPQLVGPGGITPMDVDPDAPAAKRRGSAVDARIGQLNLNDRRGSTAEARPWWAGERRDSAPSVYAPGVSSGSTYTLPVAGQQYPWAPPPGQEQPPPGTAHPQQAPEGSPQAGGPPVHSQAVHPAHATHLTHPHMMMQPVYTADRRMSMPESTTERVLRSRQRGSQDGFSPAEAEAANALNNRPKDPNTTPYSRSPELRVSHKLAERKRRKEMKELFDELRDQLPADRGMKASKWEILSKAIDFVQQMKQTQADMAREMELMRQEIDAMRGGGQPPPHAAQYQAQPPPHVIYGQPGMPPYVAGAPAPATAVQAQPIGSAPPQSHTPISRPPSSQNGYAPSGPTPPGTAAPQPANGRADTVPSQ

SEQ ID NO: 92 - protein, 898 aa, Schizophyllum commune
MAAVNMSVMPANMPLDFMPVHSRSNSFSSASSHSASRPQSSQGAYGHMSGMPAAEDMYRAGYHMPIDHNPGHGPLQPHRRPSHLRARAAASPYPRDTDSVHSSSSETDDIGMYLGQQPPDYHPMYATGPHMHLGQSQETMHTTSAMGRMSIAAHAVSNDQALEKLAANVRAATTTSASDRAKQIFVQAWLTANYAPYPDGNVPRQGLYFSYRRVCDQYGIPHINTATLGKAIRLCFPTIKTRRLGVRGNSKYHYCGIRPATSTEAEFLQDYIHKSNNTAGQQSVNAARLAVQEQEGGSGRADGSDEEEEDESDGANSGMGSKRNSLHLPTDKAAAFPRDLADKTPTANTALSQAQAQRPNFSATQASIRRHPGADAQSLAFASTSAAAVPPPSGPLPYPVPQPTLSVRQFPNFPQIEEAVGANSTSPHGIAAREVWGWFLDHLDAILDSVRHFRFDQFEMTLRNFWMNLTGNHREVVHAPAIAGLMAKADAIVYDEILEILRSQMLTPIPSQALASLRQLAIKMEKILVSALDSYGNTFVEPKVELGARFGHLILRFLDIYQVIQALNTVLTNPKQLGEMRRSWQKVDFDSVRNQSALVCNCRHEDLVQLLEVDFVALMDTLAKTPEPVKEVMSWADKCCERLMGGRGAGDDRGSMSSRSVLIRWGYVTSQVMRDLTIRSDPAFGAFQILKLFLDDWISVNVLRTVALSTNSVAASVEPVMQQQFFSMSPMPGQESFGAPGMMAHTPTTSSMLAALQSETFTGGPLDAQAGLSADAYAAFSYMDAPATTDAGMTPNVEHLGGGEPMSAAAGAEHAAMQAEQLSAAEHMSDHGLSFAEFGATGGAFDVSNFGAQDLMAHPAAAATTPGSVGSADEAGSAHSSASPAVAGSPSSNAAPAS

SEQ ID NO: 93 - protein, 748 aa, Schizophyllum commune
MGRTDLAHDHHQATFQVRWKVEDSQEEEEEAVMKEEEGAEGVVDVVDVAGAEDEAHEEGKCKEEEGAEQVATPTNDDRHPIHCLPNEVLEIIFLFSIPDELANPTPGSHVAYYAYLDRCKSIDYPHFLGRVCRRWRVAAQGCPMLWSYICVDIGARKPYNASYYTSVLAKSSENPLTLSFVVGKNQLLNTVLHGPVFSPHIRRVRMLCIQLSSYFLSADAPRVDILPLFPTVDTPLLESLRLDCRKAPWSVIRYLEKLQRGGEPIPDHLRFFRHAPRLEEFALEGLDSPDATHEAMECMSLRRMGLAGFEWQNMTRLRLPDVPRRVFDLLRVLGDAKRLVELRCTIFEDLEDEFSYEGHDEYIIDTEDEMEDEDWDEEEEEDEEDEEEEEEEEESDDDYPHAYTRFAARTRVQQNPRAPTNNATSRALADARRADRECRQRELAARHAEREVAREKKRRDNARLLGPHVFPDLTKLHLVLMAFEPENYGEYDDENPEERSGVERFLGALVMPALASLTIAHRGEEFEGGGYSDGEGYGYGYGGGGGGGGGEPKVYPHLKAFVQRSECVVLTLTLDSLAIEQSELLDILKLFPHVRTLRLVDATKAMSAGFWQALGRRERDGRLALMPDLHHLVVHQDRGRTGRGGFINVNVLDAVEARWKAGMGGGARVEVVHCPTPTKGRKGKPAQVLDSQMRGRLRRVQGRADLELMLTELPFKKKPLRQVGGSDYGESEEGHSDEVDYDDEFEYY

SEQ ID NO: 94 - protein, 704 aa, Schizophyllum commune
MVNDPKNEALIRWSDSGDSFFVLDHERFAREVLGRWFKHQNFSSFVRQLNMYGFHKVQHLQQGTLRSSETDGNEFWNFAHPNFLRGRSDLLALIQRKKQAQNSDGEGAGQEVGTSGANGQQVQLDISGIVAGLAAIKRHQDMISSELTHLRENNNLLWQEAMEARARAKKQQDTINRIVKFLAGIFGNHNARSKHEEEEAEGGAGGSRDGGPGAIVPHSVMSHMNATVPQMQRLMIEDTRPYNSVDIEEVEDDEQHSSSKGKQREYTTGQPPPTHLNTFAEPEDSTGYRVETPPASSASVAPVSPAATEGSPFFQYSSGPSPAPSSSTSSANTAAVAANSPSPVLSSRHATPPAASSPSVEKQQQHRQQLVSSARTPPYHPSASPGPPNAAINPDDFQTLFNNLSPAQINSFMTNLPNVFGAGSTSPGPSFSGSAADFNRTGADGMPSYPTGHGSFGNDATMNGMGGVEGLLSFDPSSPGGYGDGMDYDTYHAGYGYGASGGPEQATGQSQHAVAQGGPPLPNWQAAEDIERDVSALNAKINTLIENTSPSVTHAQPIAQAIAPPWSANAQLPSRPPLSTSSDKPASMGRASHPVLPPSAMATEPLPAPLDALTPNLNAPADFDFTEFLSKYVSGVEGAQDNNALMDEVMSNAGDSTGQPAHMEDQSTSAPRGNGRKRKSDAMPPMPDLTEPPKKGGKRRRGGA

SEQ ID NO: 95 - protein, 632 aa, Schizophyllum commune
MSATSEENNDRPKDLKEGAKPQATFLTKLYALLERPENHHMIRWDDAGEHIIVERPEQLALHVLPSIYRQSRFASFSRQLNIYGFMRKVNLRNVDPAIDDPDASTWSHPTLNRHSPPEVVANFKRRVPPRLPKPRKRDQQELHSIPPPRSAMGMGPAPPALSMLPQKPLHGRPRGFSSPGSFHPNPNGSWDSPYRGNHLPPLTVPQSSYIQPADHSPIYPSSQYYDSPSAAPWSQSYNSTSSSLSSLLNPSYPASRPNPTINTSYFPMDQHTSAPASMSTDSRPPTGYGMTSSSLTSISSISGYSSRPGSSQRRLSPESPSHSRERRQRSHSHAMHPYPTPYTDVQRPSTGSYDRASNSPMYDTQRPSTSPAPMDQYEDSRRGMIQLPSLPAATRGAMMDLPPPVRSMESRSQLQPPRISSTGRLDSFSRIEPLSSMSRMDGLHVPSRGDYSYGSAGDNFAFNAPSGGQDMAQPDFAYNPLDNTPPTSSAGFNQGAQTVGSGSAYTPSHSTPNSSGPYTPNGYDSSTTYPANGGYPTHPPSSAASYDPPHSSHGYESHGTYADGYHPPGSSGGYTPNPGTYQNGANAPYDPPHSSGGFDSNTSGFASRPGTAETGVNGRLSPEFGFSVPTIS

SEQ ID NO: 96 - protein, 186 aa, Schizophyllum commune
MSHQPEGTQEPEESTESGAQQQQPPQPEQQQEQQHQQPQPAQETQAPQATQSTLAPTDYYQYVLASLPLMTREGSVLDQDALRRCLELSSSYLTTDTTTAPERGMQTWFTGFDRLADVVVALHGRGQLEVATMSAASRACSECWSVAGSWRELAPCREGVRKIATRLKRLLDDNGKTYKGEAIYAP

SEQ ID NO: 97 - protein, 566 aa, Schizophyllum commune
MEAFTDMNMTPFWDLSQASQFSQLPDDDFLALLQKQFPAVGGDLAANNTFDRDSVNPRNVTSFPPPTFSPPSEESSPSPPSSSKDSTDGRNEEELGETPLKRKASQDDLDDEGPSHKTQHTAPATSTSSKKGASHGRRKSAGGQAGGSSGLSQEEQRLLKRKEQNRAAQRAFRERKEKHVKDLEDQVAALEAKNAEASSENQNLRDMLQRLQSENMALKQAQFTFAVPKNPSNNQRGSLTSDAMLFNLPRSGSSSSSSPSGQPSPPNNADGSPIDWSTLTTFDNNNTGMHLLDDSPQATASSSAMQMNIGGFENGKTPSESGFSLNGMNWQSESTNLDELFAGYLSQNQSPLDFNMLGASPPANGNGHNAGNNGNGNASSISISPIIHNYTPAALRSNPSLNNTPSISNSASSPESAVLRTPPEQAGEHKEKECPKTKAEFQKHSEELGESPFTSSSPTPEDEACAAGEACASPGTVVNNLRKGVDGTIMCKGTQFPKTEKSDKNIEVLKAWRTITNSPLYKDVDINELCSEFTSKARCDGTKVVLEPSGVNKILEGLKSKQAGGH

SEQ ID NO: 98 - protein, 323 aa, Schizophyllum commune
MSPSDFVNPANLASTPMTPEAHSPASDSGPSRKRARTELSSEEKKEARAHRNRIAAQNSRDRRKAQFSYLERRVAELEEENRQLRAGMGMTRVDEKKVEEQERERARERENEELRERIRTLEKGWDAVVKALAAQGLPTGVAPPTPMSEVAQSPSSNDTTSTHSTSPSAAASEPAVLTQQPVTSTLSVPPTTVFPLSPAPTSTSMDLDYPSPDVSYDDFAAVPAFTAEQTASEQDPTRHLARVATIEDESSMSLQRVVSNSRSLPVVKQAQPAMPYRLTTRTSLLTMPQWTTSCERSSPPRLTCRLRIYLRRAPLRRMSQRRK

SEQ ID NO: 99 - protein, 309 aa, Schizophyllum commune
MSNQTDPATQPPQHAPAPPPGAAPVGFPTDPAFALSAIPQDQLLAILRNVPNLLQGKVPDSGGKEDAAQILSNLAQFNQQAQMQPVAYPGVGDAGPSTHPRGPPNLTQLATANLAATLAARPPNPNLPTATVPGPTTVDASPTEESSQAPNSTGSASGRRAGRNPAMGTDEWTRQRKDNHKEVERRRRGNINEGINELGRIVPSGSGEKAKGAILSRAVQYIHHLKENESRNIEKWTLEKLLMDQAMGDLQSQLEEVRRLWDEERHARQRVEAEFDAYKAAHPAGGAQAGTKRSSEGAEEESAKRQRTE

SEQ ID NO: 100 - protein, 377 aa, Schizophyllum commune
MSSNSGPNSPSSSDESLPPQTPVSPQMTATAQYEKRKASRRSNTAERRATHNAVERQRRETLNGRFLDLAGLLPNLSQIRRPSKSAIVNSSIAHITAARRHRLLAARELRLLKLEADALRRELNEWRHRQNLPTVEEPPRSEAFHMVLSGELEVIPEAIDDEAEDDEYFEQQPMQPIQRGPDPRDIARLTTEYHNARDMRQLQAQQLEHAQRLAMLKAGMLKDSKSMYANPMIASPSMPQYEHPHGFDLNPMQQTFLPQEHGGFNNFADKMFDNNMTFGDAVEAKLFANSEPPAFLGQMQRQMSYGSGRGDEDAISIGSRGSSSGSPVTNEFHMGNRGSFEGARRLSINTSLSGYNGMNGANTGMVGGRGDGLYSMI

SEQ ID NO: 101 - protein, 2063 aa, Schizophyllum commune
MDTIASVQACLAKWNAGGGAKCRALLVSAHTAPAGMKTQDTLLTAYNTLLYGMFTTWARGRVLAIDEFVALVQAVVNELPSSSAHPVASTIGDQLVDMLWSVDAELQETLADATKAASEKADEATAKALANAEKDRDTMVSLVKKLLEREVISKTCCRERFDNHFLVLVGLLAVVKPFNDKEIRRRTALFYKQHKFNLLREQSEGYSKLATEIAGALGPAHSPQDGRPTESPEDLQKRVKPIWSKLISLVGYFDLDPNRALDVILDIFSVHLATHSTFFLALLQCSPWAAPPENRHPPAQITPDMYRGKSLDEILAMTETVNTAAVDPEHRPRILAQVLGFKFQHYQKTVTTTPANLYSMAAVLIHEGFITLEGLYPHLAPEDGDDMHKYYEEYEEDMRAKNRAAQNSLLAAAAPLDSGSSNQPPPPPPPQPLAKRLPPNQKAGLANALLSVGALRPALYILSRHTWLVDKYPELADLLIRVTHVAIHDLNQARKAEHFKGKDCKADFHQPRLRYGNTGMAPPPARKHLLTLVAPVPPCTSTKEFVFFFPQWDEWVPKCRSLQDIPDVVEPLLRYIGVHLYRDSLLVSKLTRLACSQLHPLRDAGQIDDPAFKFWFNALRLFFLPALSMTRGNAVFTVDVWGLVNLYPPEQRWQMYGEWRHHTYASHKELQLRRIQVDRESKGILRRLSHQSIDSLSAPMARLCHTNPTIIFTNAVGQIMAYDNLAAVFIRALQFSTLMGLDILVWVVLDAFSHPTKPRVKDDGVNLSDWLQSLASFTGLLFRRFGPDMKPVLRYVVQQLYDNKTSELVVLRELIWKMVDIEPLPSLSDQQVQAMAGGPLLRAEALVSTRRGNSSTDYERKATDSKVAQRLIDALLDSNLALPLLIQVAQHRQNALERETLPLKSLSNLFDFIHGVLLQYLDFLTNPKVQSITQYEKRILPSIRELGCMYEIAPPICWQIVRPVLHAQILQSALEQDDRMSVEKEKSLKAALAAAKKDPATSRVASPSVDKPASEVKVNGKAEAAETADVSMDVDSSAKVVKPSASEGPWLPQLSALFDDVRKLSPGACDALGVGFYTTFWQMSSYDLAPPLERYQEEVNAFRSLANQEDRKYQSSRHSPAAASMHRKLRERYQRTVESLTRELKEHTVSRTFTLKRLVREKQKWFVGNPNPRGIPSAFIEQCLIPRCFLSPMDADYCVQMIKVLHTQGTPGFWTMKVYDQLLGEAVRVILFTCTEYEARNYGRFLRGVLSDLLAWHQDESQYLTDNRLKSNEKTWINPGMIKTWKADSSRHISVSDVVDWKTFRQFLSKWHKRICAAICRGLQTQEFMHVYNTILVLKEILPVFPLNSVDDTCGIKLSLAVDKAIADEKRGDLKILGKAYAAALKSRENLWAKAGAPQTSTPSTASPAPAQRNGVAQPKPNIPAKPTTQPIPAKPAPATSTPTGPRTQTSTPEPRNVPSPAPTGTADRSSHLKLSVAGVARPSVVKRTQAQEAAASTPDKPAEKPKAPEASAQLPDKPRQSEQPKEAPHPIPVLTGDPPRSPRGHRNSPRSSMPPPPMPPPANPSSTPSAQELRDAAKQSMNRNVPSEPRGQGTSATASPRVRSPSPKSRPGTRNASLESRGSGGRSRTDGPSSDDKRDSSRNPNGRDAQPLGRRDSASHIHGERSGRDREKDGDRERDRGERGRDRRGERERDRDRDHRDRDHRDRDRDRHRKDEHRKDDKDRDRDRDRKERESSRAAGARQDERSTTRQDDRASARQDDRASARQDARPDAPAAGPGRPAAEEGLGKRRRGDDDVSAPDPKRPRSAERSQNERERGHRSSRRERRGDERGRRGPEHEGRDRPREPGDRRRRDVRDGPAEGAADRSGGAAPSDRAAEKRVPEGPAATTGAKPPPSAPSAPRAERNRTESTSGPPPSAPAAPSQPAGGTLLSRLDKAPSLGGGRRDESARRDDGPRGEAARGDGPRRDEGGRRDDGPRRDEGPRGEGARREEDRKRTFAERDDGPDNGPAANGDGQNKRQRVILQRNRYGPNGSNVNAINSYLGDGSGSSGRSGGRGGRRKD

SEQ ID NO: 102 - protein, 512 aa, Schizophyllum commune
MYRGGGPASTFPYKKYQCRHYDRQTGRPLRGPCINAGNCRFVHPTDSNWPGVEPASSKRANENGARPPSGRPDDAPARRGRSVDIGRGVDRDREYDRERERERERERDRRHRGRSYERGMDRRDLANVKMESDAERGRLLRESPKGPPPPPRAYSRERIVERRGRTPPPPPPLNRDFVPRHQEMPPPEDPRMPPRSSLAPRMSPERRPPPPAPLPSTTAPAPAANPETRRFPPVTQAAQLDKLGQLFRRIAEISHDTSASLATLSSTQAKLDTYTSISSTLAKISPAASSSIDPVIADVLLSNVDAKGKIDQGVIDVKRVWQDIWSVVEASVNDIVKARVARETDVLARAAVEEVSRVRAEADRAIRALEQEMDGHLRRLRAAAPSGPPPSGRRASDAHYDNRKRFREGEDGFDARGHALATPDAKRRRVDEDGRGVNSPSTPAGQDPALQAMLEDMRAKMNAQAEVLKSLERENSQLKTTLKKPAAEGNSNGKGEWTNGSPNKFEEAPAKA

SEQ ID NO: 103 - protein, 547 aa, Schizophyllum commune
MYNPYGYDSYYSNPYQNPYQQRARAAALARERERALEEQRQREAMRNKYFPDGYYDGNDDDYAYNWGRHPYGYVDPREQAYLEAQRLRELEERRLRELELQRQREEEELRLRALAEQRRREYEAALRQRALEQEKQRLAEEERLRAYGREQSRQRRMSHQPQAPRRIPVVSPRSSPAPQPQQRQPSPKRASPPPPPKPQFTEEEEEAATKIQTFFRIQRALRSVRALHAKFVALKDTFRWPSKVDFVARAHDEEVVSLLLPPDLLASLPPADDLDSEAKLAYTPNNVPLHGYTESLNRLLVELDGVDSFGRREVRERRKEVVREVEKECAAVENTWKGLWKAHLEGKVQPLEEEEKKQDTAAAPNTQEGNAPVAEAIAQAASDAPQDQPTPSSAADEEDTIIAEDADTDAGVKAEEVVQGKAVTDEVAKVIQESVKAQEEPIVEEPPEDEGADTRSVMMADPDAETKSIVMADAEAEAEEGWENVEGADTDAWGIEAPAPADAPSKDEEKASEEVTDPTESTQAPVPASSIFPQAREVEMARAPISV

SEQ ID NO: 104 - protein, 202 aa, Schizophyllum commune
MSNGFHGYPQADRRNVHNSTYDSPSRGNALTPQAARFAASTSYIAYTCRDPVTDRALDALNEQYLRRRLRSLGVDGAISLWTLPDFPPDVKPPIEYPILVMVALYAAPTKKLQLQEIYDAIMERYPFFRSAPSWQESIRHLLSLKIQFRHIDRPIGVQGRGGYWYLDLTHGEGDKRERKRKPGKTSSLDSVCDDACSDHAWV

SEQ ID NO: 105 - protein, 703 aa, Schizophyllum commune
MESLDAAQLDAQTSATAPEPAPEKISAYYSLVFPRYTFYVRTLSITIGRRTTPNPAAPSTSAAADNAQVDVDLGGLKSVSRLHAKIEYDQDTDRFVLDVIGRNGAWVDGVWCGSGTRAPLGERSQIQIAQRTFHFVLPPPPPPEDTPSPSSHSSTNRARSPSVDITSISPPTSIPSHSPPPRPETKPEPEEVEIPIKPPLTPPPIQRAPDTQLPDSNSISRASSSRPTKRKKPDADEPAPPRPAPLVPKPKPRPEEMPPKPQLTYAQLIYKAIKGIGGKATLQEICAWVMNNYEYYQYAEPTWMSSVRHNLSSGRAFKKGERCGGDRGKGFFWSLDEDYEQNFIDQEARAANEAKKKVKAEQPPKRVVKNEPPPPLMTSTPRPLPVKAAPASGSGAGAGTSSAATPATPATGTMTVPMTQTTAVSGTTGVFAYNAHALGQRQPNPYSFMTAQPWTFPATTTPAQSSTAAQQSASPAPTASSTLPSASVTPRPVVPSVTSPPPPATSQSGATPSTSASTSTPAPTATSTPASAAKSTPTIPDVVIPITLGPIPPTHPDHVPNAPYNSAKEGYMILHERALVLDPRIFGGLGAARLDELGKLGARRALGELTGVMVRVLKERREERRARKAGKRARKEGKGEGKAAGAGGKAAGGKGSGKATGQGAMPPTIVMDPTPSGEDTIVVVDDDDEAEAGAPVAKKARVA

SEQ ID NO: 106 - protein, 939 aa, Schizophyllum commune
MGVDATPQPTQDILALLDASGSSQTPLRPSTSANAPQTPGPPTNPFTLAAASAAIQRARLAQEFNATQLSQSPAPIRAIDVTGEDPLAQMATYVQRGLENDSKGWTVQKAIESLGATTKDDILPGMEVRLLEHQWIGVAWMVKQEKKTGAKGGILADDMGLGKTVQMLATMSIDMPGMDDKVRVTLIVVPAALLQQWKDEIETKTNGLFRAHIHHGKDKLTSKRELRDVDVVITSYQTLNQDFAVPKGLNDWDTEKWLEKKGGLLARTEFFRVIADEAQFIRNRSTQASLSLAYVRAEYRWALTGTPVTNSLADIYGLLRFGHFRPWNDYPSFDSHIIKMQNEDAPMAGQRAQAILKPLIMRRTKDSMLEGQPILRLPPKDIELVKMEFTPDERQIYDDIEQQTQVRINKYIAKGTLVKNYSFILVLILRLRQLTCHPQLILAQSGQLDDPSLIVGTDAEKERSRATKLMGKAWVDSVARKFMARAELGFNDDDPSLGADCPVCHDLFGQDKGRVLPCGHQVCVECLEDLQNSAIAHDGVFGEGSEKENLRAEQEYERAVAQGLRPCPTCKKMTNFKGDKIFKSSAFEPTKEEVKEQKRKRREARKAAARARRQPQSIFSDIDDSDIEIEDAPPKRAFEDIVLDDSDDEFPDLDMISQRPTKKRKSDEGNIYSKSKKKGSDDESDEDSDVGLDLSSAMARPKKRKTKGSNMGKKRVGKDDNQAMYERWAKSDDDIEPSTKMLKLLELLREWDATGDKTIVYSQWTSMLDLVDTVFSIHGISALRFDGRMDRQQRDAVLAAFKRPGGPKVILISTKCGSVGLNLVSANRVINLDLSWNYAAESQAYDRCHRIGQDKPVWIKRLVVEDTIEERMLKLQDVKVGLAEAALGEGTGTRLHKMSVKEIKFLFGMAKPKEKQSLAQLLEQPEDEDEDSEAIEDLD

SEQ ID NO: 107 - protein, 1205 aa, Schizophyllum commune
MAAGVQRQNNGPQSSQFAMSPFASSSHFATPHAPAPIMQQSAFVPNEQPAYHSPYAPQSYQSQASSSSLRPIAPASRPNGNSIIDLTSSPSPPPLARAVNNKLPDSLPPKTPVCIGQLAVKALILYPTPYTQPQEGEPEWVPVRLQYERAPHAEHKETIHIKEPGHRTASGQTTGGTDFGLVEQKVATTLGPMLGKGLIRLDALVKRMNTLAPILDLQLLVHTPKGNIPAVGNYFSQCSLWLSHMSAPFDLSRLSVMHYYNPHDNPMNPNFYAQHAQRPYNGGGGGRWSTPAVSGKSVEVQRSQVDELFKSLQGGDNLPETEPAQEVATTLYPHQKQALTFLLQREREIKCEDGGYSSLWQVRTNVHTLQKSWFHAVTNKVVNEEPIEAKSAILADDMGLGKTITCVSLIANTLKSAHAFANTPLERAPPPPGSNGADDHDGSQFAGSVWGMPTQYGGISAKEKAKQQRLTERQQADYARCCRIKAKSRATLIICPLSTVSNWEDQFKEHWRGEVRVTGGASGTCVPIAFSSMSLQSAPGTPSDHSVSPYQPGGPFKVYVYHGNARRPDPAFLADFDAVITTYATLATEFSKQSKSIANQEAECDEDSDNDSGGVEYDERGNPTLRLPKQRAGMKRKKPCGTAEQPSPLQSIHWFRVVLDEAHCIKETSTVASRACCDLMADRRLCLTGTPVQNKLDDVYALIKFLRLEPLDDKNVWTDMVGSPVKFAQPIGIARLQTIMKCITLRRTKETKADDGRKILNLPPRRDELRYLKFDEQEQTIYDEFFQSSKAEFNEMSDNNEVMKNYVGILQKILRLRQICDHFELVQDKEAAAQICPASYENLVAEIMKDGLTFDRAMAVFTLFREASTTQCVECGYELCKAGENTEGFDCDNPPPAKRGRKPKNPAGSSRGPTRASSPTSARPIVTRCQHLFCIECYKHSVCPGWPSVPPDTRRVCSVCQTSLCPADAVEVKVEYENAALAAAKKKTGRRERRQKGSNLANFRPSTKVRALMGDLIMFSRANPHSANYDPESIEVRMTDGQGNEIDEGVTKTVVFSQWTTMLDKIEEALDVAGIRYDRLDGTMKRDDRTRAMDALKYDPGCEVLLVSLKAGGVGLNLTAASRVYLMDPYWNPAVENQAVDRIHRLGQTRPVTTVKLIIENTIEARLLEVQKKKTALANMTLDRQSFSKAELMQRRMEELQDLFS

SEQ ID NO: 108 - protein, 1135 aa, Schizophyllum commune
MSGSDDEMIPPEPSGQFFAESDDDEDEIMEVEAPKPPSSPLSSHSEPLFLDGGDEDEDEQPVAGPSKGPESLKRRQTPDDFDILDVEGLVGKNQPEADSALSSEKPVASSSKHPPPSQSSERPSKRVRRATSEPNSASAVDGPMYLGEFIVPNAWSTSSGKCAAINEEVSIFREDLEAPAPSKAAAKGKKKDDGKKQMSIAAMFKGQPAKPNKKKVDSIVRIANKRGSKFARLPQEYATWMARLLDYEIVEFRGIVVDIPERLRTGMDVCILVQAFLLPSAFKKAETSGNDELATKFAWNEGMETEDEHMLRERKTALGKLFEIVGLRPVAGAQTGDQDGEAKKAEGKKRSGNKVTEIVGDGEEIEVDDSEVIDGNDIAMIYTRAQKNDRTMGEMDPAPSFTLKLRPYQRQALHWMHAQESGSMDARQASAMHPLWCQYNFPVRTAPGEVIDLTADERPFYFNPYSGELSLEFPKTERTCRGGILADEMGMGKTIMLSALIQTNSAPDTTPNADGHPTTSKSRQLKLNTALKGSASKKSPHAAHATLIVAPTSLLNQWAEELERSSTEGTMKVLVWHGSNRLDLEGAVQPDDEEDRALRVVVTSYGTLASEHAKWEKSKVGSGVFEIDWLRVVLDEAHSCKSRTSKTAKAVYALRARRRWAVTGTPIVNKLEDLYSLLKFLGFRPWSEFSFFRSFITIPFLAHDPKAIEVVQTILESVLLRREKNMRDADGKQIVELPPKEVVVEELLFSAMERKIYDSIFSTVKKDFDRLNAKGLVSQNYTHILAMLMKLRRAVLHPSLVAAAVAADAKDPDDNGEMSAGDMIKQFADGGGEDDGSKAFAENVLAHLSEEDFDECPICLDVMERPMLLPGCFHKCCKDCIIMYITNCEQKGTQTKCPKCNKGPFKVIGVASYQSKGTHLSAQEDELVEVVLNKNPAQSPDSEQTQSEVVLRRNDFRTSTKLKALMDNLLRLKKEDPGFRAVVFSQFTSFMDLIEITLKREGFDQYRFDGSMDVKKRNHAISEFKAPSDAPKIMVVSLKAGGVGLNLTNANYVFMMDCWWNAATENQAIDRVHRLGQEKPVFVKHFIISDTIEGRILQIQKRKTAIVKEAFRGTARDKGTDPDSVENLKIMFGTM

SEQ ID NO: 109 - protein, 504 aa, Schizophyllum commune
MMVPPPPRAPPPPGSMPPPSFIPERRSHDIPPPRPSSPPPPELIQRATTPTFGSVLSVPGGGRGTFGRAQGSSMPPSQTSAIRQPPSTSSFRSAFNAFSSLRGERREMSSTSLVSDHSMASPRSSMSSEHYRAHVLANAPVTPSRSQGHDMSARQLANPTDPAIIHAITQTMIGEYLYKYTRRTIGKGHGEKRHRRFFWVHPYTKTLYWSDADPGSSNVAESSAKSAYVEGVRSVLDPNPMPPGLYQYSVIISTPQREMKFTAPTKERHDIWLSALKYLLSRPNPANISAGNATVMPQSPMSSLSDDERDRGNMLTGSPQSARSGRSAHRSEGWNTTPRGQRSRSRMSHIGGSIGKRAGTPAAEYLRYQPESPYSPTRSFVDVPAPDDDDLDFELHGESLSDEGFEGLENVRACCDGRHTVGRSGKIHHHHHHHHHSGEPVAANGQRLDAPAPERPISPSAWSFRSRAGSTNSREGGLFGWGRGDDGKLRFGSRRSKTTPVPDA

SEQ ID NO: 110 - protein, 691 aa, Schizophyllum commune
MSSRRAAAQRAQVNIAAQADSDSDTEEDELPRKPPPKSQTKGKGHARRKSLADVSASSSSLVASRPALPPKSASARRPARAPRSGAKRGRSPDASSLTDVGSDADMTSLSSSPHSTFTPGKMMRSKAPWSLDAIRQDAWVLIDMDGHPVDGEPLTHDRSIWWPAKIVYRAPLTAHLYGDHHREHQITIRSPSPENIMSFLSDLQTIPFTGFPWIISSAPALPISPRKRRKTNLNHDDVQNAWYDAAATALKHYLENECDGFPPPSLVSHELYQRSIHIGSISEDELDAPGPSQLKPKETTENYEYRLGNEPILAQDKGYFWPARVLDMFMPEGNQRAVRFRIEFCDRSQRTVTKKQFYDQTDPEFLTCKMGDIDSGQEEPDDETLRTSALDAERSGSPEPQDPPPAANDFCDLDLREQWVYAKPVLQAILRDEYAPAKEQNFTFFASDTGRKKLTEKASARGTLTPKEIVRLRDYILEWCLRDAKHATRIEDEAIDAALEEVAKAEVQSEAGPPPPSQLEEDAVSRPSSTQPPPSSTAPSDPGDDTRPASALSNADTEMDSSERHTRPPPQRGSEAYELLSPLEKLEYCMNILLPAAVQQLLIWRSGDRRSTALLSPEEEARLYKLGVEKSKEQDWVVSILEFRKFASRVQATPKGKAAAPKRRQSIAEEPLFSASGRPKRQVTKGQSFRL

SEQ ID NO: 111 - protein, 545 aa, Schizophyllum commune
MGATHITKHRKTQHKHVEKRADSDCSKGGFYKEPTSNAEINALETLSISWDTSCLTSQQADIYLYAPGTQSSRIHIWEGVTFSDGHYDAELKPRWWNSTASQKLQLSIVEAGTAPFLSPYPAGPVFTAKYEAPEGDTPEAADTSKNSDDVGITQVQSATAEESNKGLSKGAVAAAVIVPILFVAMLVAVYIRMSRKRGQEKRQRFSQAIDKRMSTISADWRSMSAAGASAAIRNSIAPSADSNSNNRLSSFSFGNIRPVSTVDNDGESGQAGIGAPREMYQHDNAPISHLRHTIVSDGERVSRISYAEGQAPRISRVSFADSPRPRPSVDTRRSAYSVNGASRSFHTAVNAPPIPTRQDSDSSTYSSPAIGVMSPTQTAGAFSLTPEDIQSRLRNSNEGDMDNIYPALSMMHTGRDSQAPVGSPEEEHGHPLFPPPPPASSPPPPQSPLGMMPMQALPDNVMSPDDMMKAYAAARQVDPTTASSFRPDGFDPIAYPNSSALSAYSSSSASTAAQPARYNAVGMRVLYSEDEGHGAAPMPGAPRAE

SEQ ID NO: 112 - protein, 614 aa, Schizophyllum commune
MSTSSETRLAPLNSRTNLPHLLVNVATKRTSSASVERMSNIKNAALDLSLFLPSLEGKLTHSVAATSKQPAIDKTTPHPRSLAALEKLEPCYSWLASHLHNPYPTREEREALARECDRTMPAITAWFVTARQRIGWSQLRATRFSRSQILMVAAASRFWPERDTTRPLPPDLELRFAEIEANVKSLYTNSLQPSDTLVRLLKNENRPTNAKEPSRRSASESNISKKRRSEDADLDVNRPTKRRSVSNDSPKASSGRASRVRPSPPSASGPMKTTPSVASSLALTISPTQPTQPTFGEPSLQSTSPTSSLKRSRSVDDASPDAKRRRVLPEWRDPRSSQAGTRRGVRASDGPHSSASCRSISSQSPKDRNGRSHGGRRTVSAPVAPHPAPSAFIDELAWPSVLSLPTSTPQQPETTLLSPCNDNLDFWNLLPSGLDADIPVLASNDISYNSPPSGKASEPFVDVSSSFDPIVMSPTSSTSSPPGSAPITPPTLIPQLTGDSIIDLGTDPWGGLFGRSDFTCDSFPDLSAPSSSDIDFLSMLAGDKPLCGDDYSLDDFLHPCGWWETRVDTLPRNNVAPIATAAVAERPGKRALPTENESLDSAPPKRRRLTPAAA

SEQ ID NO: 113 - protein, 453 aa, Schizophyllum commune
MMCDTTTETSTLKGDGATTSIPFTSMVTTTADVTTTLYDGECSTDDGDSKTTDGDSSKPTTTDQSTTKEQSTIVTTERITTTSYSTPPPTTMTTQSSSTQEDGAVTVIEVTVTSTGSASPVVFETEAAQTRAVDAAGGTKAPANLGAIIGGTVGGVAFVAIVAFLAWWWIKRRTRYEDLFYEKTEQEIISKGAAKAVSEYERSLNSSVEPKAYQYGLVGQTSAPGGYPPMAADPFARPATPSSAHGHHRPMSMSGQQLAPGPYGSRPGTPRSPGYNMPPPGNMSPSGHMSPAGNMPPRGHSPSGSFSMPPPMMMQPPPSPGLVPAGYGSHPSTPRSANFNMSASGHSPTPSLSQPPMNAPPSPWSASHPPPQGYFPPQQQHQAQGGYAPQQQGNYAPQAQANYPAQPQGNLAPQVQAFTPGHRASESSSIHLPDEHLPPLHVANGGSESQPRA

SEQ ID NO: 114 - protein, 620 aa, Schizophyllum commune
MSAPDMQQPQQQQQQQFEVQFAQNVTPTSYATEVATGGPVPPVNDFQTDTFLFAPDEASEPEQGGKKRRRRPRDADHIPRPPNAFMLFRADFVNKGRVPPSIETVHGNLSKIIGAVWRNLPPHEAQFWQIKAAKAKQEHARLHPEYKYRPNHPRSKAAQDAKPQQIRAAARAALAEARGSNFVDVEGALVDVGPGANPHTTPYLASLGNEPTTAQTAHDERRFNVVAKYMLSGMRDEELEIAIKEWEKAHDCETECQAAYSPPSKKRKVASKAKGSARSAAARKRKAGSPASSRESSVPSSDGDFEYQFSFDSRSFQESSGSSSGPITPSPPSSYCSSDSRSPSPYSAISSSSSSQMPYQHGYYQEPMHPSFTGSYVGIHHSFYPSPPPYEQVPQQQDLPRRRSSSVPPPTVTAANFQQFQQPQQFQQSAPSAMHDTAPVFINPFAPRGENEAPELLMGGPSDQDAVQFAGGYTDAFGRRMSATRTDAIIGAHRRASSAFGYHPEPYAYGGMQNFFDPAYTMEQGYDPTAVDTMHSPAEYFEPQEYPSLVAPTPMRASPPMLNATPAAEDNYSSLESSYRPASAPAPESYTPAKQPSFSLESFVDFSACTDESDAKSEGN

SEQ ID NO: 115 - protein, 1134 aa, Schizophyllum commune
MAPKKKTTKNMRQTTLTGIVSSSPPRADSKAKKVKGSSRPTPTASQPKRARTAQALGSDTDSDPDAIQFEPRRKAAEVSISDSSEEEVLEPITPRKRRRAPAALSDSDASPAPKKKNKTKKGRTSAPKAASSKKKPIPISSSEDEAPKPPPPRKAKGKGKGKAKQPAEVLSGDEDEPPVRKSRFVKGERPPTKDTDSDSLLDEVEEERIIDSRFRERGKKSAFQKNLERLKRRKQGKPELSSSEEEEEEEGEESPKPRTFRGSKPSGDSLFGCDDESEASESGASFIVEDDGAAPVQLPAAFSLDTFQDLAHQFKKIFQFFCHIAVQPPDERHDFMEHALKNEEYFAVPLKMFRRKLIGLRDSLVAGSLWRADFKKALEIFPEFELVQMEYAVPDCDACHISTRMSTRIGRLVGYPYDPLGFQRDYSSVAIKSEDGSSDSDDDDPDDPDSPSALAKLKREFHLGKFCARRTRVFHELMHWEWALFETVRLEVDDLRLAKRDKKGYVKVAFEGGKKPPKDPTDADAICEWLDQRQIIQMEWRKVKDLMEAARGVEPSAGSSSTTNPDSDTSQLFTNSVTNPTCHLPLSAKVFGRRLDLPDSRIGHGFPCGTRRTMSGELFVHEPFEVSLCDCCEHSLCADFEVLTPGPKNNILRSGRVLSVAEAQVVKEAMAVTKNNIQDLWHEIGILWNRLEYMKEEADRWEEIRQCQAAYLAPIRRLPVEVLSEIFKICCGDGSAIDITKRSCPPLVLSSVCKIWRDVMHETPGIWADFTIPESSSLTSLNLPPHLLNRLDLFLANSGNLPLRHHTVQYFAPSNTLPMDGALQRLLPHSHRWTDMIIPNEDDNCPDVMKWLKGRSLMCLSKITSWTWNLGRGDPGYILAELPALRSVVLIDIDEGFESPRLPWGQIEELTAEMTTDKALSLVHNCPALKVWDMLSRDSQLPLEPLDVPVVLPHLHTFRVSIVCDDDIAVLERVTAPALQELQIYWRVFNPRPSGQICALLDRSSCSLRRLYLDGLEDTRDGWLESDALRELATLDLRMARLQPATQELFALLAQRDSAGLPRLLPRLESLSVQGLIQCTGETLLDMVEMRRDAGRPLHRFSLGEMSIGYGLDEWVEERLAESVPHFDIKRDWF

SEQ ID NO: 116 - protein, 503 aa, Schizophyllum commune
MAALDVIDISDGEDGEITFSQASLPPSSQLSAGEVIDLSDSDTEPDDAFVPAPSSPPLSSQPQMIELDSSSEDNSSGDEFPELGSQQFAARAPSRSNRGSHTPLETRDSGSSAGSKRTRALSDDSEDESEPPTPVKKPRRSRKTAEEKSKAESEKEAKRLEREAKKQEKETQRLEKEAAKAAREEERARKKEEEATQKTARRSFKAANKLVIDRKETLKETTIVVSASLARAYSGIVADLRTKVGEYGGQVEAEADPMTGYDTIRFRRRVTKAYDTKLSVWQHCEPKDKFDQTAILWLSAQKLAEHGARGTLGGLVDTFCARLALEGPKRQAVLLIHGMAKLQSQARGAADRALLALEMAHDAFHMCAETPAEIVQRLYDTACDVGHRIHKYLERSHLPFCAETRQPKGKSSAETWEGALASLYRMNAEHAKAIAKVYPTMNSLYCAYEKDPQAGPLLLAHIPVECTANGQKRVRDKLGPALSKRVFTVLYETDPLRLVVNDK

SEQ ID NO: 117 - protein, 554 aa, Schizophyllum commune
MSRRESRASMNAAKQNDVLFEFENYKKKFALQNKHITKLNSTLSVRIEELTAEVSTLRAENLILRASENALKAQLRQEHEKSRKILAQAEAAIAAQFQAVRAAMRIEPGSPPPPSPKLPRAQRPPPKQYPSSPTLSPLRVCRAPSVPEINEEDETGVSDSEAARRSPTLRKTKAKPRLSGSRLPMPQRTISPPLDATPGPSMRIDFTSLTPAPPKRISTARRQSGLLTIDTQVARETTKMERPGSPSPVRETIDIPDEDDDEEAPPKEKKKRSRVDKEQQVVESTETVRRKRKTAEASEPPAVLASVTRLKDVTNAVQDEASPPPEAAPSPRPFLAEPEDPMRQRSSSPIPSDGDAAGLGGRERRVRKSVNYAEPKLNTKMRKPDPPPGSAPGTTHAKKRASSSTSSAPRTSHPLTEPEDEEEDGDRRASHVRKRTTTPRVSSNTEPEDDAEEPERRTSLERRKSLERHRARGSEAAPPEEDLQRAVRRKKSRPQVMPPDASDDSDGGDADGEWMPSTRNFVNVEGRRKSSAAGGSRRTSRVGDDALRRHSVAA

SEQ ID NO: 118 - protein, 918 aa, Schizophyllum commune
MSTSDATTSSSESSATIYKGKITRSWPQLPPEVVRLIATHLLLQSSRTGHVPHAFKQPQHWQQRMLYDVLRNFNVLEKMYETCPQWGAALDYHLFYNHALAVMDPHNHLGHLAVVRVKSNSSTAATIRVPPARHFRQIYTNTCIVCRINHPTTSQGLSQCRRYHRPPSFYSYGGMCTEHWKRRLFFCGVCMRDSPPQEMGEYQYQQPHPSALVAVQENEDEETWPGVQATCRACRGQALWNRVKDSADDVAAIGGPRLSGEVDWDFTGDVDWETGLSRDAFLTWGDGAVDDVLSLARDKYWLRKHTKIRDLLEQLVVSSAYDMAVTGQRSRRRATLTPEVASNADYDDSDVSDDDVYGMEDEDGAHYREEAQVRPLALLDWARNRILDGHWLAPSEQLLISYGHIETDYAAGGKDEDFIVEARHPCPWFTDEEDTDENDTARGIAHPRISSVTLDLPSNTGLLRAVDGAFAQAMRNLLLPALKNLVRKLVQECSADAASTRAERAASLSSPQSSPVLPARTLPVKRLPTDPAVRAARLSLEDVMDQLREESTWIEGIDWVARREYRREDERREEASAKEKADEEMNDDHTESPPTSSSTASHSLPPDSDLPMGEGETKSEEGATKVAESEAMDEDAASITIAVDPVLENPRTMPAVPYIPISIAHLPEKSRRAIWEVWREACAPLYHCRCKICVRAQTVASGAEGSQTVRQNEQRLPERESQVAPLAPAAQIELLPMATLDGEDEMDDAELESYLSSADEELEEVTVQEEMEDRRMTVPCDDTSVDGEPIQEDDVETSPQRARKRSCDELEEQEALEGLPRKVRRAASQQVLQEGLHPKSNGHLDRPRSAEQLRHGKAAKPRTAEAGKGARSGEVSREESIRGGTDGGRRLSYEQVQIRVPIYSSRGLQEKDLVEYAR

SEQ ID NO: 119 - protein, 570 aa, Schizophyllum commune
MESVAPQMSFPPPPDASDSVRTPYYRAPAEASPAEAPPSHKKKKGTKDHIPRPANAFILFRADFTKNHKLPDGIEKNNGSLSKIASSEWKSLSPEARRFWDERAEEAKREHQALYPDYKYRPVHGKNSKHKPKELVGVWNDTKEEPEASKPEAPTAPVVDDRWMEGCSTFSVWKADGDDSKRGRGRPPKGLPPPPPKPKKGRKPRAKPVSASSQPGAEVSPEEKEAYERRCAYLDQLSARGVSGEAFEVAKQAWDDAHRLKPKRASPSGSAVDADATEDEGPESESETEATRRPPPIPPPPAPGNAPPRVVASAGSFSYDRPPMPPAMYGPDPVRSSFTQEPTLERSTPREPTPEKAVFKDASPEPDTERVADYPRSFARGEGAPPVLPPFTHTPGEPPRRDSFVRGSDDSADVEMQDAGSVSKAPPSSKRKRSPPSAPAVDQGEKTTRTDESSPAKRPRHDEPQAPSPTAPAKPPSASRASSLTTADGEYDADGDYDMEDGAAEEDEDGIESEDTDYEEGRAKPKPKPRSRGASAKARGRGGSTPAVAKKAALTKKSPPRAAAAVAGRA

SEQ ID NO: 120 - protein, 645 aa, Schizophyllum commune
MPVDKTRKPPRQSANDVKIPRPPNAWILFRSHQSKERKKNQDNNNIHQQPAQSVISAEISRMWKELSVEDRRYWERMAEREADRHKKLHPNYKYQPQKKEDKERERELKKQEKEQARRERDAAARAAKGKGRRTLAAPRCVPSNAPVASLPVAVPYYVPGYMPGSTDAEFAGYGNLGPSPPVSAASSPEPDHDWPDASASPASSGPALTPLPTPYHTPQVESDASSSTSISPITYQPPHGQPLPPTVPIPAFKPVYIPPQPIHPQPIQTQRVPSGASSAPPPTPMTTGSTFEQVQQESRPQSTFEHQQPEDPIQQLHRLQQAIQEQQQREQQASTPAVTPAPTDWQPQQQLPPASHMPPSQSDWHQQQPRDMSNGWQQPPPTPQWQDSPATEPPPSEPSDSQTDIWPSQSSETTQVQDFLTFDMPASGEGWPVSDDGSQAFSQTFTMGDVGQSGMLGGLRLEGTDHPEMFMVQPENWDLNPDSFDLANSTIPILNGSMLDFSFGLPENLPDATSPSTSYAATPATEMYATPGANAVAGPSRPMSAMPYEEQPSGSAGSDPMYMDYRYGDEFINYDGGAGPSSRPAPAHSQSTPVVPQASEASPAPTYTPPSGAQFAGVRRVGGAWRRPRPAVEQEATPSCGVPAN

SEQ ID NO: 121 - protein, 508 aa, Schizophyllum commune
MSSARVHGWSPAPGGVFEHNPTSSLMSTFRVKCNRDAWSPLDKPSPTSSASSVLTEFHQCDDAPLNPPRRGDPGYIPRPRNAFVIFRCDFCKKHLASMKKNGGTSKSRGKSSKTLSKIASEAWKALSEEEKRRYDELAKKEKAEHARCYPHYKYRPLRRGRVGVARSARRGHVLARSVYADDDGDDDSDYVPSPRLRVSDPPVVEVDPPSSPPASSPPPSSVAPEASPASRPRPTSWMSAMPVHSAHYTIPEGVDVQKTEPLFLSLPQHRKSPPPAQQMQPPSLVQPLEAVAATLVNWSYDGPPPAQGTPSYSMTPSTASPYPSSFVPAYNDATQISTSGAHTPTHAFTNPSYDASNAYAQAPAPSYSYDQVSYVDQASYASSSSGFAAYAAPVEQTYQNSGTVNPAFVHAPLSAEDAHYLEVYNEMIVNIQDGDAGQYYNSGTFGDASAHGFAAAAPASDAPTWSIPHDSGAPAALPFDAAGYDATDANAGAYNTFAYGDAYNHGPM

SEQ ID NO: 122 - protein, 280 aa, Schizophyllum commune
MPVQQSTASAARALLRRCRPYGAPLDNNGKPKVARPPNAFILFRSDYIAKHEGDKHQRSLSQAAGATWNLLSDAEKLPYQRKAQEIAERFKRENPDYEWNTPKAPSSKSPRSRAKKSSPSFSAASSSKTPRTKSGRRAASGAAAPASPITNSDASTIDWSEVELFSVPSPSPSSWSTTSVTSSSWESSAPSPIVTFTEDDFTLPAALTVDEPAPIPEEPAFYQTEPTFSPNDPYFCTQAYPYPTGDPSSPEFNEQFLQFAILPYKQDIVYNSCLSDGSSW

SEQ ID NO: 123 - protein, 428 aa, Schizophyllum commune
MSSSLCASCRSSSFTSQSMYALFFAEMWTRPAPLSHVEESSVRAKIAELQNDIRAREGQLERIAEEKATLEDYVLRASALFAPIRRVPAEILMRIFQMLLPVGVCKFPRAFTPARVCRMWRSIVTGEPMDMRPQASPSPQPDVSVRTPIASPLIEGPPFGVSRDLARTGSGSDLPPRLSRAASPLTLHSLDQCHSQETFQAVTSLLSLSRQSSYYTSEQSDAETVDIPRSSAKDLTPPRSSSPQDGGKAECANCGATHTPLWRRGLNDELNCNACGLYYKQHRVPRPKTTARNGANKPAPSSVKQEAEPPVGIICDAQCHNCQTTVTPLWRKDPDGRTVCNACGLYFKLHGSPRPISGSSDVIRRRSRYGSRPQQQQTPSASPPSVRIAPAVSIPRAVSKTAGSKADRPTKRRKLGEMDTSVISQPCY

SEQ ID NO: 124 - protein, 1075 aa, Schizophyllum commune
MDISSASPRGSLDELSPRIPSMPSSSHSSPWSQSMPLSAIGQQSPNANGYSSAQHTPRPSAVGPGPASTDWASIFAAPLNPSIFAALEANGVFGPVNQSLPLSNAQPSSLPGPAFSDHYSLQGQSRQNGNLNHRTSLDSQGSWSQPQSTFSTPHIRHQRPNLPRANSSAGEGARNKLGLSALSRIEDSTRQSDEGRADRLPGRSALSRSLQSPDPGLLHPTSYGSERSLNGLPPSLWMSSASDASSHSDGRNHKLSAEASEPPSSTRASSHAYSPLSPLSPTTETKSVAFTDLFEGGFMSAPHASEQPTSSFTSPRAGSPDLKSYDEPDPEKMAKEDPLATQVWRMYARQKATLPQAQRMENLTWRMMALTLKKKKEEEEAGSKTTSPRVEQSAGPKHEAQSPKVASPSVPTAQPAQSASNAAGPSSEGIAGEEVGRGRRPEKGRSRVKVVGFDGANPDGLDEENETRDISMDWRAFSRSRSRVDMDWKPQSRSRSRPPEHTSFDQHGMMASNMSFGFTSMLPPDDASFNRPGKTSSSLPSSMSLLSAARRSPPFASSTVGGELPSVYEEPHSMPGPSSFDGQERYPNNLDFHPFPSSYNNSTFMPASLPSLGLHGHKIPPGSSPGDARTFPRHVRKTSFDHTVSKDGLLSGLSGRHQVNGKPLSPDALAGMKRRADAPHAESMLRGDPASVPNVLTGPQLPGDDRYERNSPFPSSTFNFTFPSYDSVGMFGDGGLSGPNADGGEGRYTHHSSARSSISNPGFGSPSNNELSAGAAAAAASLAENYAHLSAGGLSGLDGSLDYRHLMGLVYPTQGIDSDGLGSPSGYTHVDPTQILAGVGQADFGNGLQQHASPSSDGWNASSNASPEPYIASTASTPPSGDGLPPTTGRQAAQRKYVPLKQNAQRKKSLPTLQSPNGEERRSTASTPELGGEGGTGSGQQGGKGGSEDGEAPPILCTNCQTTNTPLWRRDPEGQPLCNACGLFYKLHGVVRPLSLKTDVIKKRNRASGAPNGGNRKNSTGAAKTANRPRSQSNSGLIGGHRVGMVGSGNGNGLAMKRQRRTSTSLQASAGLRRE

SEQ ID NO: 125 - protein, 469 aa, Schizophyllum commune
MFVTDRASTPIARPMLNVNTKSGSGSRAPGPSATVTNMSAASLRSANNNTAPGGVKAECSNCGATHTPLWRRGLNDELNCNACGLYCKLHKRPRPKSMRNSNDGSRNNNQPRQEVADVMAQCYNCHTTATPLWRKDDEGKTVCNACGLYYKLHGTSRPISMKSDIIRKRSRHEAARAAAAGRAGGGFGETPSASPGVSRRASPSREQSPVLAPDSTTGAYEYVPQQQDEQQQQAYAQPVNTNGGNSSELMNALGQDNNGQGQDAYQNTFQSSFPGPYHPDQMTLQYPSENPLPFTSADVSDYDLNTSPRTSKRRRMSVDSASEPPSSAVSYNSYNDGYGTNGGNGVANGGHSQRNSISSDVFPFNSFPSYNWNTAPIMRNQNSNAYWHPPMLPQQNEYHHQGGGQTENPMDFLHPPMLPQHEDDLFSTYIHPPMAIPDDQSQMGQQVHPPMLWPDYSHDNSYDNSMHGY

SEQ ID NO: 126 - protein, 674 aa, Schizophyllum commune
MPADAPSDVSPRNVPVWEVCQHFARNSLLWASRTPLSPFGLLLITNIIGVEPFTDTLSHPAAMSRAQTATSQPAPALPKVGETRCYWALLSADLQFIYLDPTFASHLEQQAEQLVGKSLLQFVHPDEQASAKQDLGSVLDSRTLHGSVTRVRFSRLAYVRKQLGSEGDIKVAATDSDYMPVDIVINWAAEGLVLCFIHSIVEQEPGKDNDEGSNPNWCGTPVMTLDHFQLLFRRLLVCVPQAGSGIRVFQILSNQQERQLMLSWPPDQGHGPMGRDFSRLAEKVAMGGSPGETDAKTSCTRRFRSMQTMPGIGADVESIFIPHGSIVFACHKVNAPSRTSSTPTSMQAYGQTAYAPPQPPYYDQNHGYGAQPPLAVNPPPGTYLPPSQPNSATPDPYSSPRWAQPGQWQGQSQPPPSSAPSSSIDHQRAGTYPPQGQPWPTSQPAYPPAGDAEGRPLSPGDEVPPPKRRVSPGQTRESSASRSNSGASSNRPMGVLKCSSCKTTSSPEWRKGPSGKKELCNACGLRFARSRAKKEGHVQAKKRKEKGIIKRDSATPPAGFRRYDDGSTEGYTQPPQHGPPVEMSPAPSSAGSVGSVNSVNFVHYSPAPNSQEPPRTPYAPYYAGVTSPLATQPPVGGAYETGRTSPGQILAPSSFERDRERDAPEQRRSVVGGA

SEQ ID NO: 127 - protein, 225 aa, Schizophyllum commune
MTSQVNDGSLDGNMAITDPLALHMFPLDWMPEPEPEVEVEVAEPPPKRAKRRQVKNACTNCQRACKKCDEARPCLRCVRYGLSELCVDSQRKERKKGARRGPYRKRDVNNSACDTGPAATPEPVSQEPPPPRPTAPIPTPPFAPAGSYSPEYDQYTQPRPQSPEQLVEEPPSRVQIESPIPVNLGQVVPCLEAWGYYSQPAHHNHHAPFKGHGYMQGPVPSHMNY

SEQ ID NO: 128 - protein, 110 aa, Schizophyllum commune
MGITASILAGIPAFIAPITAVFTSCADVFKTHHETKQKKHETKQKKKETEKKEKQVSGDDSGGKGGGENGGGGGGAQPQVIVQPIVQGGGQGGSQDQQQPSQQPQQPQQP

SEQ ID NO: 129 - protein, 489 aa, Schizophyllum commune
MTTAQSNPRANLLSGLRTGGVRASSLQMPHSAAPTADHFNIHRYAGQQPSYYEEEEDEVPDMHGQTLYVQQDPYRSHAMTAAVDGPNFGRQQQHQQASRPLNPHSATFNPSFNYAAQQQAQAQAQAQKLKQQQQQQLEAQRQQQQFQMQLAQLELIKLQGLYNQNVQLELLAQQLQSQQLQQAQQQAQGRRVSNGFIPPASAAPHAGAFDIRAATLSAQMRRNGQAEQLGMGAPMTASLNGRFGSRSASMQHPVPVSNFDAANTSTDSYNSTTVISGGTPLGAASPPPSKSDSASSWRRGGNNNSVLSGNNRSVTSPPIKITPPRESSPSQPSAGPRSRPKPLQFNPIAQQPMGAVAVNDGLDGDDDSSSTGSSKSLSPTTPASNSSNDIPIMPLSPREEATRKLFEGLGIGRPSSANAQAKQDAHVVEAPAATHHRLVSTPVRQPRGPPSGAEELGPKNFATRIRRKAIGGLGALMGARERREVVEAY

SEQ ID NO: 130 - protein, 383 aa, Schizophyllum commune
MTTSSSMAALEAKYGYYTPIYEDINLGVLQDQHGNVVLSAAHPAVQDYLHQARITLKLPHNYDSRVVALAALETFYHPLDPAHWLLWGRREAPTIGKLLDKLVLKDKSKAIYHHGSWIGSDSMLFTLSTLHHPDWINKVKREAPWYDQIVAPGEEWWAKEKKIRSGASRPTTRSATRPTRRVTRAKAAEEAAAAAAAAPAAAEPPRKRTRAAAGTKANAVAGPSTTTTPAAKPRTRQRVREAPAASGSGHSASTPELSRTVSSESTPTLATPPTMSSPRIISRPTQPSADSRDISPGSVTTAVEVIPMDPKGKGKATSTNLAAESKQTKGRAAPRVIATPTNTRPSRAKTQTAKAAALGKRKAADADTELAAPPPRRKAAKRA

SEQ ID NO: 131 - protein, 228 aa, Schizophyllum commune
MSTETGKIFNVQEPTGAEAAKLQTTAAHAQVEAGSPAAARQVEKTADQTQHVAESAATAAKSIGSSLTGDVGGGTTRLEQEASAKTNAAVASGQQNVAAAKEAGAGYVSAAKDYVNAAVEVAQNYIPESLGGHAPTLQAGAQAAATDAGKVLSAAQQQVQPGIEKAREFASQGFASQASAAADATTDPTPPASSTGIPATSAPLQSGAHVVDTPYPPGEPVKAGAVAK

SEQ ID NO: 132 - protein, 623 aa, Schizophyllum commune
MDPQHDDIRDDAPALRAHIDWKPAPPGAEEQAKVDQLREKRKQREREHFQKLLAAHRKLREAQEREREGGSTRHSSTRKRSHKSHRSRDEGNERRKSGKHSRGVEGDDKGHGNGGDDEERRKRRAAKAARRAEGSTQDAPGPSSSPRPREKGSRSQHSNDVERPKHRSRPSTSSATHTDDVSRPSTSTSAAARSSTSAAARPSTSSSSLAAARLSVGSTSLSVGSTSLSVGSTSLSVGSTTLSVGSTSALRLSSISQPSTNSSQSRPSEDSHASHETTQSRASHDTTQSRASHASHETHASHDTADSRTSDDVLTSAEAREELDRVFSMAPHLSSLNRMGSRSSALNESRSSALNASLVRANTTGSGSNLARSNTAVSTSSLSTKDPDTLTRSNTDAASTLAHSDTTSAHTSPYLIHRTPRARPEGAISRFAARHPVEGAARHLGEEERPGYAGEGSGGNAGYAGSTYGGRGGAAGGGGYVGSTYGGGGGSTYARSIAGGATYGGGGSTYARSIAGGATYGGGGFTYGGGYAGATYARSCGTLLDHPGRASTDGAYHRPPPERPALHGVYSERPALHRVYSESDFSLPPDPFDDEEPSITKRIVDKMRSISSLRALARKDKRF

SEQ ID NO: 133 - protein, 1251 aa, Schizophyllum commune
MGSLLDMDVDYDRPQSPSAGGSSAAYDAAAPSGSGAQNLPQVRARITVVCAECKRLKLKCDRKMPCGSCVKREATSKCQYSAAAAEKVDLQSLNNRLVQLEQYIAMSSGGQFSSTYPLAQVTGGASYAPHSCSHGPTPTSASFPFPALSQLLQASVDPVILTLPTRPLWTDWTWPTDIANAVQLPPVAHSSDGAQEVSTSTTDPFSCHRSDMTGTTSSAVTFIKQGDIGTGKLRAPANLVDALPVSDLLEALPAIFTTMRSYLPGFFHCEYGHARVVENLARTDDKRTAAKQKAKAQQIFFGNNPGRPVTKPPGFAPNDPLFSSFSANGADASPKKKAGQDDEWSLSFYAAACALMALSPNPGVDGLDADYWYAQSDQACHAWEQYCGTPSTKEGSNYVTSLLAQLSYCLTRADAAGASEVIHKAAMFFRTHHLTVGAKDEVATKNTKDVREKWMNDVWLDIIFWDAYSPQGSFVSDKMGQPPLISEGCVPAMENRESESPDFLVQRFRLASIVRLTKTRYWTLDALEAELAQFVTSVAEVSLDSFLPSTSSNAAKKKRARNLPDILGDPDKREEELHIQKMDLVLAAWQTLLAAYVPTLQHDHRMANPKWGGMVHAAHRVVKAATELLSYMLSGPSSSTKHCVPIAVGAGSATSCSFAPLAAMYPLQHTLFSAALVCGYGALKQPNTVWASGASEGVRDAHGAFSSPVILKLGDAIGESLGQREALQILDVILSKLHASSSGSRKRKHDEYMGAAADDAQPLASGNDASAEDGAQQSAAPLSERLARMGEAAKEKNGERPEKKKKRVLYPIIGIRVRAGSASRSTDASEVTASQSAPTYAMDLPAEATPSVAQQASASSSQQAPSLESLAHAFEELPQNPTASPVMPAYFGERPVSSSSLQFDARAIVDPSQFDPYDQQQQRMARGSTMPSPYVDNMSGTSQNVGVPHSNAFGDASQGQRSRRPSVSSTYNAGSYDAQSRAPYEVGHRSSSYETSRASYEPSFGSLVGSTSAVTSPYASTGSSGSVDGNSGSGSSSSATQMPPLQVPALPSPYGQPLPPVPPPQQPQQYYDALPAPSAYQSQQQAQQPQTQQSQQALQQTYAPATFDPAPYYQGQSASYQGSQASGSYNGAQASGSGGYDVKPTTAMLDAQARSEGYASQPRAEAYGSQSRQDAYSAARYDGPQTDSSSVYGDRGSAYDDRGWLPPPRTAHQQQSHQQPQHRPPPPSHHQPPQHPQPPDQYWNGGYSYNG

SEQ ID NO: 134 - protein, 835 aa, Schizophyllum commune
MQQRLCSWLLALPQFPPIRNLGLTLRDCDLRPSSLLRKFMHRTRLSLAEWTIYPDEYGFSGYDLCDLVFSHYTVLHTFTLDPISLFMVRTQYRHDPGRFRRLLLEVVAAPALRNVVVHLKVDDEYSVLHWEPEQPDWAALDDGLVKCPLLEQVSFSDSETHAVLGEVCRALVDLSRRRVFVHLTANRMESLRISHLVNELATILESPLCTISPHVRHLTLQQPLPYRGGLPDGVLRRLPNLTSLTVDGTEDEPCILPDLQPISHGLLPLTVLTLKYANVVSFSIIAHAMVALPRLQSLCLYEISDQDTDGSSDELIPNPPEGTLAHLENLVCIMERDIGARLLRRFLTWVLALPATPPIRALTIRLLGAEPDVLLHVRDLVERIAPTLTEWRIDPDDGDDFLGIESIDLPFAAFTCLRTLAFDPIDWCTLRVGFGGPSRALVDFLSPILAAPNLERLVLRFKIDKLSGKETLRDVVFMMDFRKVLPKLARVKLEDVRPVLEPAARGTSSFWGYSQSCLDSNAHVGEEDIPAYAQEVKAHYQGTHRIQGLNLIHPSPPPSADQDLVSNVPDLSAAQLDFWANFNFTNEDGPLGPTSDRSAKSFSDKSESPVISSASAQQRGQQTFPQLPNQTQQQQPQVDIGSLLYALQQQQIQQQQQQQSFAPQQLASLLALQGFAQQQNQLSQLQLPPLQPTLSRSTPSQAPPAAPVSQPPPPKRQRTVSAAAASPATPSPLNTAGMSSEAAAIAAAEDKRRRNTAASARFRMKKKEREAALEGKAKELEERVAELERECETLRRENDWLKGLVVGVTGSVAPPTAPSQQQHTGGTGTKRGRDD

SEQ ID NO: 135 - protein, 871 aa, Schizophyllum commune
MHPTNRPQTDHAAPVPLLASQPPPSLHADVDGDVRFDSYAPRPVNYLEEAINIVPRHAPPSQSSHRAIHHDALPPAHPTPHPDDAIPRISGSKGNRDPDGESTDDASPSHKRARREKGTLPLDANQPLTTRGKPRARVYVACLQCRNRKIRCDGARPACHNCTVKGNPECNYDALPRRRGPDKVPGARQRPSAASGRSTSRRRTSATAESYTVPSQSTSRRNSVDELDLQPQASYPQQPREEHLYFEEYDIQPYRQQTPYYQAYGDVSPEVAGLAPRSYGEPSTSYEYPYHYANQVSPLPLPPVLCLTRQEQGAYDYRDDYAPRPSTTFLSQPSMQFSRSTWWDNLLSLYSAPAANYMPHISASQREWAAQQITSDLRFMFRVSNYWFSFFHVPTFFGTFHNAYRRDNMQPGLVYGALAISIFFRSSQLEGKEMGRERALRFRDMAQGYIDAAYNAQSIDLELAQAAWLAALFEVCAHPLHSTPRCAAALRILDAIIQSLQFTSIDFEDPRTSMFNQSSVPIARARVEHAPGTDLARTHAHTQGPCECLSFTLKHNRRPEEYVPPTWEMTPAWDPKWTEAEIEKESSRRLLWSSLYLFSGHHTYNLSYGRAPVALHISAPSNYAVFFTGESSIYSMRPSSAPLAKETVWALFERSFLLWNATILMVMRTRSPLTRMSDVEKAHFAISVNQEADAIEAALRGHACEIERAFLFHSRDYLFSARMCVGYEYRRVLPATSRADTDTTYIVSYRIAIGRQVMQGLHTVTGNATNTLNRRPFFVFWFMAQIKSAIRLYKSTDLPMALELCKALMPCVDYLSTLFPCPEQRVRYAALVQEVNEACLEHGQPLYEQLDFTSVMSNPNQNSARLTTYED

SEQ ID NO: 136 - protein, 1083 aa, Schizophyllum commune
MPPSLIRHTTGTQSQEDSPSSTFMSTPWTNVIPSPVIGDTSNAASNQHHGSHSPGEEDDDVTPLVTLRPDSSLEAPGMSGSHEKMVRRRSSKACDQCRKSKCKCERSAQGDDCKNCVMLGVPCTFLGPSRKRGPPKGYIDAIEARLHQVEALIGIMLYSAEVRMDREHGVVDREPSEHRDERAAGILRDMAQGRNRQQAGPKFRQQEDEGASELSSALSSMHPSNEWQDRVTLMMRKTRRDASGSSARQGAPHVLRNSSAPFGHRSGSTSSSEDAGPHDSSRRQRRRIAHDDGMLTPGAGGDPYARHNLHRSHHSFSSLSVQPPNEPYVSSDATSPTSPAYQPSFIRRSSLSSRYPTVPQSSSYTSDAEDDDTPAAVTSGIGELSLNEDEQVRYHGRASGLHLLSNTERHDRRNEGGIWRFPKARVWPPVSNKTTRMTLEAADEEYRCRLPELRVQEELLDLYFSYVQTAFPIVHKQSFLDTFKSMTTSASHESPGSPASDHSQSRSPFNRGPPRVPLLLLFAMFSIAARYSDNAPASASSRGLAPSTQEMWDAGDEYLRTAKLILGNTYSASRPSTVQALLLMGYREIGIGAMAEAWTYIGMAVRMAQDLGMHRTADGWSRTRLGGKLFSEEELSERKRIWYGCVIMDKYVSAYIGRPLGIFERDFDTPLPSANDPEEYEDCKPYSSLCSHERMRLQAVPGRSISCFNASATLSNILSMIIQAVYSVRSGPTPDDEIQYLEGLLDRWYIALPEHLRRDPGFANQTAPLPHVLALHMQYWCAVLLLHRPSIKHIKKNRGASTLDGADLARSEKSYDLCASAANQITSLLTMYVDYYPINRCPTFLCYYIFTASIMHVTALSWRPEDPQARMGLSKCLSALQMMEVIWPAAGRALELLSGAKISAPNTDQLTPLTERHKRQPDQSVDDLYRSHGQSEVYRDIILRANNGTLPYISDEEAFAAQEGSQPLPGPSSLPNLSFDQRWPPTEPMPYSGSVPSTSISSSLPQSLYGVGTPSHPRVPSGGEQQPHGQRYPPQYYQELSDYQLNQYDNFPDQFMLPPPQPPAAQQYPSQMYGSEFNNVFNH

SEQ ID NO: 137 - protein, 345 aa, Schizophyllum commune
MSTPPKAYIREAKLPQEFGELSTTASRAFASHPLNTYWSNQKVAVHLQEGKQKEKSLRELARLLESTLRFVWLTGGRIMVVAVPDADGKEHLAAGAAWSGPDSSEKASLLAVLRAKFYRPILDWGLAPLKRGLGEYLPVCDRQRKEAARKYGVEEDGYWYLELLFTNPDDEGRGHGGKLLREMDAYAPDKIFMLHASTERTIAIYNHKGWKVCAQDTIGVGKAAEDGTRARGEKAKGVRVVLMLKVSLARALWFPALTEDDRSLHRDLRKGRSLGLFVFPMPQHLRRYELGHDPTNARCTNVEVQPLFSKGIDVMLWFGSACHRRRESGQSLTDHGNRFGLTGRE

SEQ ID NO: 138 - protein, 810 aa, Schizophyllum commune
MPADREKDVLHLSSASPDPERPPSSLSADNASTSRATQHLALDEDQPLEFRRKDGSISRMRSHKGNIPVLPQTKLCPHCPAKFTRTTHLNRHMRNHTNDRSHQCETCGSQFTRSDLLTRHKKSCNDPLSHLRRKACISCTESKIKCDRQYPCSKCISRGKTCEYKAPVKRASARKPMDPPASAKASSVSSRHDNPTTSASSATGPSLPNSHSPLDSSTDRLAIDFLTAYRDPLPHSGFSDTSSNFYNSVASDTTTTHTGTDAVGTTRSHLASMYSGDMFQPFFSNVFSDSPPSATHISSSDTDASAGMDPSLHLIPSMSGGGLGMADNSNMFALSFGPSLGPEVSDMRSAPHYELSLGRSKEGLSAACQHYCTSRPPTRSVLSKLLTIYRVRSGETDALFYSAFLVQIPIVHIPTFKLDECPEILRNAVFACGALFVKTRKAASYITQALGTTRELLLHEFAKDPHNIHEQSTLITAVALLQTIGLFHQRPSERASATIYHGMQIMMIRRHNLIGLNALWRPPNITEANREAAWREWVRHETLKRGLLWAYMHDCCHSIYFALSPSFQPNEVMLHLPCEDRLWNAASADEWYMALQDRSSPYGDMETRLTGLPLQAAITSLTAARLLTTPIPLSPFGHFVLIHVILRALFQTCFESRLPRSDGSQRSMREEELTTQEVFGHQYALHNWLQNWLKSPDMPKLEQGAEEPPFIQHSLPFYWLGQVAILAHQEGLPPFEPNSQQNLNGDVRFKMVKKWLKHSRGFVRMSDKGPTVFWDELMKIRLQTWQLEMEDEVAVVNEDDPGLLGFFPES

SEQ ID NO: 139 - protein, 771 aa, Schizophyllum commune
MTEGAMSLSPTASAISNGSDNGQPNKRRRQNGSDANMAAHLMGGPAPPQGMPQQQLSPSQPNQSHIPKRGARACTACRKGKNRCEGEAPCRRCQLSGTPCVFEKPEKKLNPLNGPSVERLARLENQYVVMQSQMIGLQTSLDRILHAVQGGPAPPPAPGAPGNMAPPGPLFPAPAPPPRDGPYPPSHPPRNGFDSDRPRGDFPPLPGFAPPPHKYATYGIVPSTAPSSDDESEDTLPRAALNAPIEALQGLANAAAEAAAVPSTAHRVKKRKRAEPIPRNAFPHVVEKGLVSDQEARELYNIFFSGCHLFIPLFDPMYDTYESLMERTPWTFDAILAVAGKIRSGNGPLSPTFYKCLEEAQGIARSSLFGPVVRKEAVQGMLLLAAWSTNGWLPSGHAMRMALDLGLHRALEKLADDSKKRTDEEERDLVVSARIWLCLYWFDHQMSLGTGRPIVLRDESSIRHCRLLLKHPMASPTDVRLVALVELVAQKTQIYETLAPLNEVNHATLSFIRRANVALDKWWEECNEMHRQSMDEHSLLHKILAGELHYAKLWLVCVALRGVSWDKMPFEQRELAFSAKDAASTCLHIFLSSPEYRAALRYAVHDSLVTAAFSGLFLLKMANLFPGELDLVQIINQVEQLSQLLSDVAAERYALTLRIMLANLRRKVGMAGGAAPAPPPATMQPPQFAENMIMSPTYVDPSLPQPFSMEELGIVWPSERGFFSPSAIPPWLQEQSLTDLGLPVNGSDGIFLNMTGTNGWTGDQVPMPEAW

SEQ ID NO: 140 - protein, 924 aa, Schizophyllum commune
MNSYSTYPQKRASLGFGNLQVSTQEDPERAIQIDENEYTARPGNAHAHASFHSSLEAAAAANGGTSAGQGASGSAGETSTSQDFPGLSRPLTHAEQERLAHLDKLKFFLATAPSRWDSANGGGDYPGSDLQQQTDAAHSHPSLNRFLLPTQEYVSCVLWNGLYHITGTDIVRALVFRFEAFGRPVRNMKKFEEGIFSDLRNLKPGVDASLEEPKSPFLDLLFKYQCIRTQKKQKVFYWFSVPHDRLFLDALERDLKREKMGLEPTTVITGEPAMSFRYDPKRTLYDQFVAAAQPVSDKDSESRSSSRSSAADESDSDASSSKPPTAAQKTPFFSMFNLFEGSPTYKQRRKKTPGSSNLNPNKSGLSMQMERGRQQMRFPNYPYGPGGSLSRERMRPFGGMGDMEGDDVSAAEMFMKQARGELTGPGRNPGTWNEFSNRPRSLDLGGPQHRHTYPGPPMEGSPNLEGPLHANTLDGAQLDPTGKAFMCPLFSCGRLFKRMEHLKRHLRTHTMERPFACPMCRKRFSRSDNLGQHLRTHSREGMAGVERIPGFNGGMEGEGMDFAMGGEGGMGFGMNGGEWDGGMESGSDMDDGAYGSMPQSSGMGSMSNVGAPLGMFGEMGAGMGMAAQLPAGPSNEGFDLTVRGGNEEEGFFPGSAPNGPVGFGDYDGSWSGPGSYSSSSSASSLYEQNISMSAPSHKQAFDHANIYPVPSLLDAGGTGPIRRHRSMTPSMAREVRRPTTAGSDYDGTGRGMHFSPHPSPSPRGFHPYSRPESAHSSPSNFPLPLPHLARSDSRSSNYSTGEMQEQMRHMMNIGPASRQNSSDWGTGAGMGGGGGGEMFRTESPASFGGAGAMGDGASPPVFGGATESPAPFSTELPPVPPAGGAGFGGDVYPGGMDAPASFMNPLDMPGGPSRSGSGGFYPPH

SEQ ID NO: 141 - protein, 873 aa, Schizophyllum commune
MPADTSGVHARRHSVRKSSGDDDLEVRRARGELSCAECRRLKLKCDKKIPCGSCVRRGCPSICPNGSLSSGQGMSRFVLADTTELHGKIQEMGQRIRQLEDALAIFQAGVSNETHPLLRPELLSIKFGPERLIAPEREKPRRDHSVDSIDALGTLTIGERGDAKYFGRSAGSETLFLAGAELEPPIDEDDDYSPLAAEIARLSSSFPFNDGFAVTERTLDLLYTYLPEQPRAWTLCETYLEHAAWSFRPLKRDEIIDDLLTPVYKLKKQRATDPTVPHSVSAHKLAVLYCLFAIGALVDLTLPPFNAEARNYHHLGRAALSSRSVFDSPEIATVQAVLLMANFHTLGGKRYTMDSAWSLTSLACKLSQTLIADRDPARWHMDPKTVQRRRNLFWELFAHEHFLSLALGRPAAIRLSYCDCEFPYDDEQTLDDKGQPRIGHHRWKIEFARDILAVVTESVLTADPPSYETILDLDRKVREKVLPEHLDVFLSPHDEHYTPFTFMKGGLLSQYRAITLLYIHRSFFAQAMLDHPANPLRSAYAPSFLAAYRCASKMIKTSLNHFERFPELCLRWWNVWTHLFSAAITVGCIVTRAPSSTMASSAFIELGLACDMFAKGAVHSRRARSGFAVLCKLRLKAFKAYSQFMSGGKLPKSEDTNYCDDELAIFGGHTRVLVSKMMSRWQIDKAGCNGKSPKQLNGTSPTASTDSAPASPMTEVHPSLVEYLSLLPPGSQVPSPPSASEGLTDSEAAARQSAFSYVTGPAHKPTTLPSLTQQFTPALCNGWTAPSTTLNGNGGVSASTNGTTTQMPPDASMFFDMYGQSFPTTDATAPLHATEDAGLMDLGMLISGESAIDEQWMSFMRDTVLTDKNSRHA

SEQ ID NO: 142 - protein, 648 aa, Schizophyllum commune
MRLPEHDSADSLSASPDGLSAFGPAGVSNGAGPSNGFKKGLTANGASAPPGNGVAVPKHGKATARVDLQGTALYPGSYVDREEFIRLIVQSLRDVGYEESATALEHESGYAMEATDVSDFRQYVMDGQWTKAESVLTRLVAPDDEAGLWDARFLLSQQKYLELLEAKKLSAALNVLRNEIRPMGLEPDRLHVLSSYLMCEDPDDLRERAQWDGARGISRQRLLTEIHRYVPSSLMIPPRRMISLLEQSRSWQQSRCLYHNSPAYSLGYSLYTDHRCDKDAFPSVNTLKLQAHSDEVWGVAWSHDGRYLASGSKDQTAIIWMIGPQSDPNLREVRPLHVLRDHPFPVNCIAWSLDDSVLLTGSETQIRLWNTRTGLCIRMLDKHTETVTSLEWLPNGSGFLSGGLDRQIIRWDPEGRKIDAWNEAAVRVTDLAVTPDCRRIVVVGLIGVPPVEGRTVSGSGGGNMTLDDLVDQHKMIVYDMATKQEELTLPLEGDLSSVKISSDGQYALVNHAPNEIHLYDLNTGRLTRKYTGQRQGHHVIRSCFGGVDGNFVVSGSEDGKVYLWHRETGALLEVLSGHGTGSVNTVAWNPTRERMFASCSDDCSVFVWEPPPPSSTEDAMQEDVKGKGKTRQPWEADGVASSSSSRIH

SEQ ID NO: 143 - protein, 322 aa, Schizophyllum commune
MLAQDPDNTNTMAKAGVTTVPIKPVDTVIQTGVDPVVPSMDGYDPLQADLGQLLSMGDGWAEQYLTASPTSMTGSPDDTPLNEFLSTPLFDDIHDPVIGGIDANMPLFGGSEVYTGDVVVPSDDKMDAFPMGGLYTLSPSASPVDTIDPFATDFGANDAATPAPETPASNSGRRSSGRPSKSGGRRAQATGTRRNISVNQLVPLDAPTQTRNYLTDSATSRKEVPAVFAKKKRARSQAFPEEEEGAIDLSLSMTEREQIEAKRRQNTLAARKSRKRKLEHTQQLEASVQFLTEQLELWKGRATMLQGVCRDHGLPCPTFEDQ

SEQ ID NO: 144 - protein, 957 aa, Schizophyllum commune
MNYHDTDDGSEEDTGQDQLTGNRKRSSRACDQCRKTKSKCERGPTDAQCKSCALAGTACTFLGPSYKRGPPKGYIHAIEQRWHQVESLLGALIQCRDPKVQDLVQTMRQDELAREIIDRVDMGPYGPSGRQTDGATKEDIFSSILRSNESTLGSRDSSRSRRQSRVSREIVSSSKDRGLSVVPTKEWQDRLADRLAAISARTSMTGYGASSSGGPGYHSSSPFESSGVRLAQRRRLGDSPVSPGVPQPPNWSEMYTFDSDVRDRDNIEPSTEAMGELSLDEHQEVRFHGKTSGLHLLRRNDRTDDRIEGGIWYVSEVLNVYRKLPMARVWPQAKNQVVASPSAQEDDVEVTMPPQDVQDELLELFFSYIHPIFPTIHKDRFLSEYNLRKSGASSKGSPSENSTGTPKPESSQKVNNLLLLSIFAITARFRDDAPAPSSLNGKMWEAGCEYCDDALKILTRTFHRSQPSTVQSLLLLGYREFGIGSMEHGWLYIGMAIRMAIDLGLNCDPGSWKIHGHMLFAPEEIQTRRQIWWTCMLADRYASMYMGRPIMIRDSDHDTHLPELDSVKQPWQPSPPLNVSYPPMPSRSMAAFRAQCRLCMLQHLSCSCTCSSTPGLIVGSIVTDIYPVREPPSATKRACLEELENALHRWYLDMPDNLQFDLASSTRPIPPPHVLILHVRYWGAVLLLHRAFRVTEHGQSTIGGKAFDLAQGAASHVSAIINLIRERYSLRRTSPFLTAYLLASGIMHILTLTVRPSNLQASLGLRQCLTALNEMQVVWPSASRAWDLLDGVKLGYEKAVSIPHTRGEGTERKRDLENAFGPEDQKNSDYLQREAFGTYGNTRQEPSPQNGMRDLSQRIMAHMLGLDIPGIEPSTSFYPGYEWWPRGMQEPTGDVFGQPAQLQQMPASARPNGVAAGPAGGEQFSNSQLGWIQQGGTNPEVFSGYGYDFPNANQYGI

SEQ ID NO: 145 - protein, 892 aa, Schizophyllum commune
MASDNATPQPTLSTTWDVLGPFPIHAREQHLLSPSFPLDLRNEPCVDPDAIYPSSYADNGTISWSTTTLSADGSLKVSFPNIRWQALRATEGWAALQHHALLHGTLTVPEDATHHRLLVSLIQGAYFTILPRGRLGLEPQWYAGNIYDLSASQPQSVPIEPGEYDIWVAGDYEIRLFGDPGDGVPIQSLRLTVELESIAEPSVQAVPTHHVYPDFLDGLAFGEAIGFGVRSIAGWWSVADVALKTSVSGLSLTLVLPNATLAPSQTRIIPIRLSQTEPLPTDSAHDRELYGPLTAETVTLSFSIPITKTGKYIKGTYLYSGTMPTAFYAIPPASSDLALQGPVLLALHGAGVDIFSTTFWQDALPRVEKHWTVVPSGRTSWVRFPCLFLLSPFKSFFLLSFIFFGLDWHGSSALDAWRSFDALVDIVKARNIAVRTNPIAVDAKPKALLVGHSNGGQGAWYLASRFPDRVIGVVAAAAYIKSQAYVSLGMGRGAHYADPALNGILDASFAADDNDLFLTNLADIPIYAIHGGADENVPVWHTRELVSTLKTLNPKADVTYREDPGQPHWYDGIFDERVDAFIDRVLSSPTALAAPASPYSKAIERFTLTVASPTESGTLHGWAVEELAVPGRLAKLSVARTIPGRVDVKTQNVAAFTVDKDVFEHLREVTINGKEVELRGLAKGTMRARFSFKNKEWDQDDEHHPRQPLRAQSILSTAHGPIKVSVPSLAPDSPELSLALRIVHDLDTYHKLDAEIIEGRPNDRSSLVAIQVGKPSDAYCRLLEDDSAVLLPRADGVCFRGKKEHRVHKPGTGVIALDPNVVDGRTKIYLYAADVAGLERLGRLFPIRTGVKVPGWMVVGPEMDTKSSGGILGAGFFGTGGEWNVGMSWFSE

SEQ ID NO: 146 - protein, 831 aa, Schizophyllum commune
MHGHPGYPMNPSPFAPGQPYPPSHQGAPPQSAMSPTYHYPIHPQAYPPPYVYPGYPPTAQQMHTQHPPPSSPVSTAPSAPPQAGNKRKRGSGRPKNNGDRASDDEASEQARQAADAKKRTKTQRACDSCRTRKIRCDVIQDTEPPVCQHCKQYGFECTFFLPITETRFKKKKTEDEVPKQDDHSHKQHGSSSQPQRDVGIVGLTHVAHLLHSQAAIPSRVYESYDLRYNHSFEVSATGDGIITVQKPPTDDFSNASKPMDVRMEPEVIERLLNAYFTDVSWMLPVITKEEFLSLSPTPPILLYSMCLVAAAKRDVSQSIFDSLRYTVNTIIKAEDILSTPSLVNVQATLILCMLADCHSQFVPSALSALWIRLGAAIRMAQDLGLHRAESVKQNIEMRRRIWGACVISDRWISLTYGHPYMIDVQDCDARLPSSGDPNDVYMDELVRLSVILGRILKTIYSPSGLTLVTDDMLHALLHDIEAWRDGLPEKLKYVGPQTSRTAGLLHLLYTAVCMIFWRVFMRISYSCPSHLKFGLTVEQWTKMVVLTGNAIDWLDANENYYDVWLLVAYSATSCALVQYHTWARRKDADAAAKLRKLRDTVRRWEACLSPDHMSARRKTAEIIGLLYVATQSPAMPMEPAALNPTGGVTGKEAPSLDFRKDPTRPGGGVYVAQGARASDFKDLPAGTVINELDGAAATPSSATSTDRTDRNFTFSPSSFVPTLPSNNAGLSAQQMDYALGVPSNVNPAMNGAAVGGPSVQVLNTLEGSPSSLAEFQQADSFLDGLPGGMFDWDQWGTFFARLNNEDAGMGGVFQPPPAQAQPQLPNRIAPM

SEQ ID NO: 147 - protein, 518 aa, Schizophyllum commune
MRSATTFVGLLAAAGSVSASHGAQRMRRHHRSAAKRDVVSGTAYYGYQNDRTTACGTVSSDDDFVAGVHAAYYGDIWSASDKCFQHITVYYGDKSIDVTLTDAANTTASTGDGDIYLSTAAFTALAGSLDVGMIDVTWEWASGAASVADAPTTQEAATTSSESAPTTSSSPAPPATTDAAPTTTDAPTTAPASTSTSAPATSSSAPSGSSNEGWKVYQSLTGDTLINYFGFDEGQSDNSGVANYVNGKDTGLVYTGNDGKVYINVDTTQNVGLRNSVRMTSAEKFNPSTASLFIFDVEKVPAVCGVWPAIWFTGSGTWPYSGEVDVIEGVNQYTQNIVSIHTGPGCTFADSAVSSLTKAALVSGAGLNCDATVDTMGCGFSMYDTASYGTGFNAVGGGAYAVQMSDDGISVWFWQRDQIPADVTSGGPNPSSWGASVVTYSSASCDMSSHFQDLMLIITNNLGGTFPEGVWHTAGSGGQAQSCADITGFDSAANFVQNSGASFADAQFIINSFTIYRY

SEQ ID NO: 148 - protein, 565 aa, Schizophyllum commune
MATTKASSDKASQAHNSLQRGKACLRCRKRKMRCDGIKPACQQCVRAKKADCCEYDDGKGKTRTQLLRENIARLEARIRELEDPDSVPAHPPSIQLQQRKTSGSSPSSLGSPLGTPISATHSPFPSESSSPPKTGSWTSLPTVGSPDPAFDIFFDDHAAFEVSGELAQALLDIFTPHRHQCGLELDIGRLRESLTAPIDERRHEVLYNAIFLWACFVSRPDPLCQNEEHYLNLALDALPLATQDERYVVDVIQASCLLATYFMCNGRIVESTYHAGAAAAMAMHYAGMGLHLPKDISKEGERILTFWQVYNLDHCWSIVFRRPSLLPDGPDPTTTIHCPWPQDVSEYEMGHANISTGFQTVQTFLQNSSTGGFSVQALRAKASAMFHRADQISRSWDPRMKPTQALQNDVQVLELVIVQYVEALIPVSQLDAALPEDRLVLLCAHTLAHASMIQLFRRFAVDDGLSYEKCLRAARACINIIGHLSDADYEFLDPIMGPCWATAADIFIQQLDDFESAWPPVSTADVRGDIGTLLYAVSRLSTKFTMLVTASSKIQKRLAQAGTTL

SEQ ID NO: 149 - protein, 657 aa, Schizophyllum commune
MNSMNRRQSQSCDACRARKVRCARENPEDAKTSCKHCISLGIPCTYEYQPKKRGPPNLYLRRIQEANAAKAAQQAEQAAGDDSTSPSSASPQGFLPPSLTNRSPSMETPTMAIPSVPIPPSRYPIAADNYHTHFPQLNTSVSPGSFGGPRSFETGSPNSLISSPKTEESPIYPGGDFMNGYPMFNWSYKQNQTLAMQPIPALNAFYRPRRLEEIAPRDTVSLIIALFFDFVYPLTPCVHKPSFMADLHARREERDPLFFALVMSTVASTLVQVPRSYLPMERPVVRKLAQTCYEASRHITIASYDPPTSMHVVIRYFDCVYHFCEGHDATQHAAFGESAHIAVTLRLHEESSYEGLDPIESEVRRRIFWLLFGADKSMSILLGRPICLRDEDCTVHFPKELDDEYITPSAYLPQPQGKTAIVSGLNYTSRIFALLGEILVRIRVDKRSPPQGQFATARLEEVQSLHSRIIAALSHAPEPLRLKQPHASSPLPADYGGAGFRQATFAEVKDFFDNPNASRANALNPFLVMQANLYVTQQLVRFVIEQYRDELVASLQGSIDEYHLANEREAVARDLLNILHSIPIQSIATNGPSLVHKVRFVASTLLDAVRKAETAPASAARAHAFLWDFLSILSEIERNYLLDDDRDGTSSDGMMMG

SEQ ID NO: 150 - protein, 386 aa, Schizophyllum commune
MMSDPSYSPLLGKTDLAMDDYAPETDHRKRRRNRTTQSCLNCHTSKRKCDRKRPCQRCIQLGLTGLCVYEVDDPALRDDPNVDETTRLRNRIAELESLVRELRGKPQPRWADSSFRNGDPNEKWHSRAAKCSPLQARRRLASPHPANGTDGIGPTTRSSVSSLLSPIKTEAASEARSLYRFSPSPTLPTVHFPYGSSEHRSTYSSTSPTIPFHSTHATNGYSSEANQREDSGLPYPLTTDGDSRYISSGSSGNGPACCSCRQTPAIMNGYLSLARQLQNTVNGVRHYVSHSDSQCQVYRRIVELNNVMQLTVGTSGIDGSSSSPYGSSTPTDPEVMTPLSASSSYHGHNSSPAVSPQEWNALATTAYNPYFPNESHSVYGSGHVMT

SEQ ID NO: 151 - protein, 276 aa, Schizophyllum commune
MFATEVMSDPVKGGVGFLLDVALWRESSAETSSLASFPSTFPGGSSVSSGTPSPAPPSPAPTPRLRSHAPRRSPSPTRRADGPRTRSRRLADASQSQRVSVKGRPRCTGSSLRAEPDAQQAALRDQLLEGAQAISAVSNSPVNTLQSNVLELVFSTYTPYAHPPWIAALALVLGREYAQIKVWFNNNRQQRTPKGKPRRVEKVLPSHARHPSDVIKAYAERAEEVARMTLEDFIEIVTAERDRQMALLDEEEACKKAVMRREDGGNRPSKKRVRRC

SEQ ID NO: 152 - protein, 604 aa, Schizophyllum commune
MSASTKTQQNGQTHDDIEFLSAPTRVARGMGKTGRAPVFATNQQMRALQAAYQESTFIQGSRLQKLADDVGLTQRWIALWFQRQRRKTRDEKPQEADQPVKQEDEVPSVKGNTNGRVRKRRKSKKMIEDEDDDEQDVGASSSKSLVKKEPEDSTATVPAKPLTLTIRLPALKRAHPTMNDAHSEVTMVVDPQPVTQTASSQPTASSSRPRSGSIIDFGDTNEPMPAPTEHQQPLSFPRQESFPSASRPPSPQEIITQPQYQSHYDPSSSAPQVFLPVPPTLQPPGSPVSIPSSSSDSDDSDLASAPPLLASNPHARALHAGAPVDPDVATQPAYKFTDPTRLREMYVDMYSRPGPAPLDVLAPPQKRTRTAYEHLAKYPTLAPGERAAMGQSQMKQEPGEGSLQPRPSPYMPPPPPPAEGEEDPAMALSSHAEEADPTAREPSEEVQLAYPDAASPSPPPSGTLRTSHGPAAALRTQRTFVKTEPASDAPALRPANFEVPPVPYGAPPWRPMSPQPSRRQSTVAIPNEELDEDSPAALFKQLAVLKVADDAGPVDVDASAGQEYVTDREEILRRLLDPALAERDPVQAAMGLVFLARVGMQDYL

SEQ ID NO: 153 - protein, 778 aa, Schizophyllum commune
MVRSSAMLSPADQQTPPSPTISNKRKKVEDEDGQGQAKKQRTRVSFSCAECHRRKQKCIARKVPELCKAYTPGKPDQDLNLRVARLEHIIEQALPQYWNGSRHSSSALDEDAHEEQDITTGTFQSGRWYGSSASTSLAPHSLIDQLSQAGITSQGLSQQSEPKLQPPPPSDHETSAAEKFKLLVHECGVPAHKISELMQELPPARMSDVLVDYYFSTINWTRYPISEREFRVAYDAVRAHGNEGACNPNDVRFLPLLFVVLAIASRLAPDSIAGDAHHRRAVSLRYYWSSRRALLIAVAIQPDSLDIVLTRLLSARFLTFDRRITECWSQLGAAVRTAQALGLHRDGSTMGMNAQLVEYRRRIWSYLYHADRSYALVLGRPHSIQDDYTSTLVPSHVDEDAAAAANGVLTIYPMTHPTRLTFIILRHYLASIIGQIVSHFQRVHPPPTYSEVVQLDDQLVRFITNLPPHFALDPDRSLDETHPYIPIHRFLLITEILFVRTSLHRPYLLRRLKSDRYDRSRQACFESAIRDFAVRKAFRESVPQEARDALSNAYREFQTAMISGIYLLLNPHGPYAKDMHEILDGFLLDHEGQREMDETTRREVKTIEFLKAKASQAEAQDATSVGSAGSDSSAQLLLGLKQGGGSTATYSPSRGAFSSLGPHPPPPGLNTSPTIQRLQHQVADYPVGSPVSGGSPAEDGESKAQSLLDHFVHTMSNGPPVDPMSSAFSWGGSGAGDFSGWAGAGAAAPPMTDPALMGIDGNEWSYWEALVNHLQRQP

SEQ ID NO: 154 - protein, 761 aa, Schizophyllum commune
MSDQATSPVRRNSKTDDNGNARQKRRYGASCEACRRRKRRCDGKGPDGRSLCKYCPQAGIPCVFPASGEASKIDKAYSELSTCKALLFALAKAGDDERERLLAEWIATQDGRYNGDTGSPETYSESSKEPAAKRPKHFNPVKLDEAHDVHDSKSPLRVVTEGVTPHAIVDKKVRHPSPASWGRNLRYTYESTLRSLIGHACAYEPKFAPPTAEEQQMLLDGYFSWQNPRYEILSRPVFENAMRTGDSQFYSEFLLYALFSGASRCLPEMKDRVADFAMKAHVLLAAELCKPSCFATVYGCLLLSANLAATGWYSQAWNMAGLAIRIFNDMGCDADSSHSVVYDQEMDQAQRYARQRVFWSAYIWDKSLSLSLSRKPSLRTKINPPNFSIQDSEQMKWAPFWSPSQANDWSAQHQIQQPPQTSWEMTCFYHTCTVYQDQRPTQMRDFVLDLKDRMTAWQAQVPDTVYVNPDKLPLVSPPPHIIQFNLLIHTTLILMYRPFYQEDASTSALPWTIPACHKAAQAIHSLLSLHERAYPLNRVIYLTIYAAFCSATIDMGLISNPSPQVAAAARYRLELTLKVLAIGCETDVPGIRRSVIALRHYMDHHSSTPSSRRSSQTNLSARLPHDGQPVHEPPIPEEHLRAQHQLQHHHGHGQHHGIRSPHDMHAPEGLMPVSSVRLDPHYMPPNQEPVYGYADHPPAYEFHQQAAPPPQAADFPATDFDPTSYLNSIYMGLPQPMPQWENVQWQQPAHGAVDFFGLGNY

SEQ ID NO: 155 - protein, 538 aa, Schizophyllum commune
MESEPLDLSASERAQTTPQPSPPSEQPATATSAPAPEPVQDPSQPQQTGSQVQESADASMAQLPSAPSQPLQSLSPVPAMSAPPPSGPSGPPPHLGPPSGVPQQMPPPPLPQLFGPPGAPGPTHFTQMPYPMPQALPQTANPSPPVAPITTTRYREGAGPVDHQPHPDCPDTLACLPDTDGRPQHTLPVILRCAILGSPQKRLTIRGIYAAMEEKYVYFQTAGQTWKVSTPHHIWRVQAINRTQQSVRHHLSLNRLFERVPRAPNDPGFGSYWTVNLAAPPGTKRPRKRGKPGAAKAKGKSTETDMDTEMGGSADGTAKNGDSADADGDGDGDAIGEKDEEHPGDPDFESEEDTRKDAKEDAADDKKTNGGPARRTRTRTRQSARQPYPNGTKAAAAVSAPPAPSTTEGGEPVDGTVVDRLQIELAALRRQSAETITRLSEQLTQAQADATRTRDALNSTQAALEEESRKRKDAERVVEGLRRAGLLQGFQPVNAPLNLGPVPPPHSLPHMPGGPMPMPPMSGPPMSGPPPQGPPRFQ

SEQ ID NO: 156 - protein, 803 aa, Schizophyllum commune
MAFDWRSHHTPSPTPSPAPQEMSDEQSAQSSHQQRVRRRKRLAKACDNCHKAKRRCDGNVPCSNCHHASKTCTYTDALGRPVPAPGQMRLEGPSSQPKVIPPPAGTSGKYYFTSFPPQSYEQSTSQPLPELPALGPSTSSSLAPPSDNGPSRQHTRQTDERYNPMRRPHPSPREQVQAETPESVLTLQHARKIPLDNALTRELVNLFFTHCQPARMIFHKPTIETALAHNTIPGYLLFAICALAAPLSKQPRIQCTPARYGGTPFAQEALSLMFDGAGRLLCEANLSTAQALCLLQIHDMISSWPAASWNKKHSSLALLIVEKLGVNQPEYRYSTPLPSTEHIRASIDRECVRRVYWLTYIMDIYASIYFKAEPTWLEREPHCPLPQDETTFELATQAATPEFLHLPGSQTTSASETGHLVRITAIWGEIELALDAVDDPDLKQEVSANKFSALQEKYEAWEKSLPQHLAFTEENLEYQKSMLATSSNTGAWSWACMHVYRATSVLALHYARKMLQPGAMLGCPSWPVPVILTIHQMMGDRAMNSTLLGGILWALMKYCGRNDDEIHKLIDANNNLWGVYMPRLVADKRSAHRHMSPPSSHSSPAQTPEPRSGPRLKHPSMSGPPTSASYASSTTSHPTPSMSSSLPPLVPPGHMPNLIAPLSANIPPPFLASHYPQAPIVPANAIPPEFMAGPPPPSIAQWMHSRRPPTASWSEPSSSNAQAHHNHNNNALPSLKSSGLLEFAGKGTADPSSIPPPPPLAGPSIDTSMRQSTSDAKDGQPLSTPVRSAPVGMPWLADEPVSR

SEQ ID NO: 157 - protein, 946 aa, Schizophyllum commune
MADEPSSGATRTKRKGAALSCAECRRLKLKCSRIFPCTNCVKKGCGAICPNDSLTTGKGNRFVLANTEDLHEKIQQLALRVRTLEDALAESHSLNDPHNPHPLLANELLQIKRPLERERKSEPNPVPVDEDTKVTTAAMGSLAITESGRSTFFGTTANSWYLLQDDNSDEERPAIVATDNYFDPSIPPEVAWLQHAFPFAGRAPEEAKQHILAALPSVDEAHRLCDIYYRHAAWMYTPIGETDFYDAIFRPAYYPPPVSPYDASPPPEPSAHEVAVLCMALAMGTLLDLDQQPFNSAANKWYQLGRAALSIDSVLDEPTIAATQALLIMCHYMFLANKEGRWVVMGIVVKLTQSLGLHRDSGRWNLDPNEAQKRRTLLWEVFVYDAWQSLTFGRPPSFGMTHIDTKFPLDTVKNERGEVEMNFSAWKHRFCAECLSVIQDQAFGAHTPSYRTIQELDRKVRTFYVPPSLLVPGFGGAQLNAGAPQPSMQLTMQRYIAFAIREITIFYLHRGFFATALEENPVDPMASKYAASVLAAYNSAQSFVGLVTSLHKQHPRLTERMFFLFSHVFSCAIVLGSIAMKGPRIRIARSAQANLNAAYSLFIAVQHIPRSDKVLPILQKLKDRAHAAMGDAEASYSPSIHGPYQPSHQSSLSHSSAFAQSPESSTSTVKTEEDVDEQISALGGRSRLVARKTSSNPSSPSNTHTGSASPQSAHGTAPSMYSASPVQHTKPMQHTSPNPHTSPMHHSSAMPHTSPMHTTSPLQGTAPLRSFPASQQSWPPYGSQMRQQSDSYPRHADPYGQQPQPDPYCQSSQASGIDYLPQGFTPPADLPPQTPNDFTSPTTRSSQAFGNGYGSGGAGQYSAAPAQFDGMQGQYGSPDALYSAEPYGGVGSNAYGGRFMTLDAMPQYYGYHSMAVDGALGAEFSVPAGPELDNSWQSLMSQYQGK

SEQ ID NO: 158 - protein, 689 aa, Schizophyllum commune
MEPDGHASFSESSSQAQEGQKIRRTSRACLQCRSRKQRCHVDPDNAVAPCQRCKAAGKACSFETEAPRGRFHPYEGAESSFRAVEQLRNELASHRKRIEELEAKVGIPSHASPSTHTVNGDYHAGNSSSASISSPVTQPHEMPRAPKRKFTMDGVSLGAPIATLRKLANEDEDDYPDTPAIPRMPPPTDGSPYSMRAPSHARPSAFGMDPVSQDIITVDEAQSMFDIPLLFTTICSIGARYWHCQPSSSQSWLHPRYPQIIDQLDQCIMSLFLRPTSADMCLETVQALLLYAQWMPLEVPATGSTSLPRSRFNDVSAWSMIGHAIRQALFIGLERCVYAFNGTQEITEEDMRRMRVWVNLLSTDHHLVMTARLPMTLDPFPATSVARTFGGNPLAEPTDLRYAGLCELVAIVNRAARHSGDAALCALDPVSLQKANNDLDEWDSVWTVVFSSTPGYQQFNTQMPFTALRWYRLGLNVVSLGPGFFSRRMSDKREPMSTALRTSVDAAASMLHCLSAEAAHAPLGQTLRTLPRTPLTVNPKALASFRFSIDAYWVTHAFATVFLALAFERGAIDQELNIVMPQMAPPVHHPPHEASLLARLVCLASDIFDHTVAHPPAAHYREIVFNTKQLLFQPKPSASANPQTNGHGGGGLEDIFATIMHDGLDWSSDPAGWPGQYAGPVAPGMAYSA

SEQ ID NO: 159 - protein, 699 aa, Schizophyllum commune
MSKDPTQTSAVTKRKKPPACDYCKARRVICHPQPDGKPCPRCVEKEVVCTTTPTVRRKPQRRHADNTEPTAAADAAPSTSKSCSSGASQRQAGQQNAEAPPVVASVSSRESTRIGPVLSWRDAHPLPAPLIEELIKVFPYLPQSQLPIVPYHRIHDKLEACGWNPSQLDAHSCVLAHCIVAVTARVSTHPMLIGADVTDTQLLEFLSSGNLMITPGLDLRELGRRRDTICRGLHDEACWLAREAGITIYTSEENAASCYLLDFLESSTHSYDSSLSWSAAMMWHVRALAESEDHSNLFSVNYRRLHWPVHLFDCALLSIGSGRSLPFTEHDERLICGLPPIDIETATITLATEPLTGKSIGEFIYPFLSHVIKLVRSSSENLVGPYARRQPLDEAMLTSHLCAVEALQKTCVFLHACIESAIPRVKRNWARPALANGLFITSLAVPGLLIPLHRELKRRLAADSSGGGGDAVGTGGHDGVGGLSSMTGIGHALPSTDYARRRLELLQRQVRALALRAVVEATRRARDLPSLPYMTHLQNTRFEEWLQMLVDESEGCDISPLERYETLERIADLFKLDGFAWVERSGAISLVESEMAYLQAQHHFVPHSWRPDAWADEMLVDGALEDQALGNETAALGDEDAFGDMWEMPMGDDHTSLVPPEDFLGQAIVPGTTPGMVDDPQMLGQSFLQADTHLDFTMS

SEQ ID NO: 160 - protein, 823 aa, Schizophyllum commune
MSVRDSFPPEQPSEGSSAPARRKKRHQTLRACDLCRRKKIRCDGLDGKKIPCTNCADYDLTCTYGTHQYKQPARRIIIADGPPKRYTDALERRLRQVESLLQERCPDVDLVAEFGTPPADPTRASASDPPSPEPSPSGGGQGLSYVDSISLVLKSIIEDDDDTTVADDEDDGPEPALRQSTSKLSLDPFESRYQNKAHETRLFHIIKDIKADYNGEPMRGPEAEVSRPHFSIIQPWESVTPHVYHSQYFFPDPDLLVRLVDAYFDNMNIYFPAFHRMSFVKAVFQDGLHLSNQAFGATLLAMCAVGSRFMADDPRVLADNSNSPASAGWAFFRQVADGRKITLARPTLFDIQFQLVAGQFLAWSTAPQAGWIEAGRGLRYAEDVGAHRRAFYDGVHTPALEVWKRTVWSLIVLEVLLGGCLGRQTALASNQYDLPMPTPVDDEHWGSELDGYTWKQPENVKSVLAGFNIYIKIIRIQDVMLRTIYALKPTRRSAGLPTSYDPKIMSILDAALDECMAQAPPHIQWNPSQADPVLFKYTTALHAYLQYVRIVLHRPFIPSRVEVSHASLVACTEAAHSIARMVEVHRNRSGGHAPLLILMTFAAGIILTLNVWQCRRGGVSGDKHDRFYEEALFCVNFFERHESIWPLANRFKDALKELLSIEQYPSPQEEWRQPPDPRLPVPSEYAPYSDPLRHSYDSVSSTTSSASSPTDYACNQPTTFGGWPLVPPHPNVDLSPTHIPHRVLPRYGAAWEPPQSEWAQAQAHQRADHWPNAPALLIDDWSSYIDTFRQSGRSGGAQMQQAHQLGAHHSHPHSGGDAYMNMM

SEQ ID NO: 161 - protein, 805 aa, Schizophyllum commune
MASVSPPQENTPESPAGESPATNNSNETRSAESKEAQAEKRVRLACHRCRAKRARCSGDRPICRACEKANEECTWPSGRKRKRTRREMEADERRERESAASAAMAEHGMFAPPKPMHEQNNLWNLPQTAPPQLHSGGGPSPVNHDHAWQFPAPLPQSSYIWPPSHGQHRQGSDHASPNTLNGPFNDTPSPDQHRTEQLVRALESQFAFIDGDPSRNEELELYYYRISGSTAIHPGINRISLKLQPRTNNPQDSSTAAAPVTDTQSIPYTPPPPQEIFDPNGLPLPHIHIPLLDTYFRTMGRHFPSIDRKRMEERLETGTMSAFMLNCICAIAARFHTQNGESPTKACAPFITKAQELLIPLLHLPTSDTVTGLLLLAWANYGQNSESGLWQYTGMAIRMALDLGLHETHELFESTAHIKRTRLLFWNLFITDRIVSFSTGRPVSISEEIIEIPLPSDEDMHPDSARTTDPAAYQEPVQPSPFPYLVRLMVLCGRIANALNGKRGRSRTLVGPTVNPGLLGDLQGQLVQFYEELPAGLKWSVEAFQHQEARGHGGVFLTLHLWANAVLALVYHPELLSNTSGVETPMSSNMDKSVKLALGCSRTISECLVFADLFASQSYLASPMAVQPIYVACLAFMYDIKLGMLGMEAEQQGNDQQGHGSGGPRRKVDLLLTSLARQNLSSMYRALQRMEHYWAGISFVLSVLNQKAKGIIEFNAPSGTEKKTFISLPDTGLLRRFTGKDLPYNAAPPTETSLRDSMAKEQSERDTYSLDDIFSSYSVGGMFVQPADSFDLESLLSSSKGGGLA

SEQ ID NO: 162 - protein, 276 aa, Schizophyllum commune
MASSHHHSSSSVDRPERSRNAKAQARHRAKRKAYIEQLEQTVAKLQLALGLPSEQLSVLPPPSIRIRELEQENARLEQENEELRQALAGQNGNSADEMPSRSGLTGFASTRDSRRRRGEDYLVPSIDLGGPLDRMTPPSLSIPSSGNLSQQYSPHPLSTHASSASSSGYSLSSVSQNPSPFHHTMPPTPSSGSSSPSFSASSSMAPTRSPILAHPPSGFSSSHYSTSQQIKVEEDAYLVSVPAAPPAPSAHARLSGLKPIFIPVRIVSPVFVLPCG

SEQ ID NO: 163 - protein, 312 aa, Schizophyllum commune
MSRNTASDFLGPIRYPYSMSPHVASHPYRLDEAPRKRPKYTRSKTGCLTCRAKKVKCDEAKPVCTRCAHGQRECTWPNPRQSAIKASDASDAADSRSSNASSSPPVSEPPTPPIRTSTSPLRRQTAIASTAVPRQPRRASMESALPSPSTPASARPTAVQVQGRASQAVSGPRSSNERPAADYGEGLPSYSMADYAPYMNGPPNSIYNLSSATAPNEGMLYGPSSHLDPYYTLPHVNMPPDLGRSTLAAPWEGDFDAAVPDAVATKPYDLVRSAATPSDVYRPDQRVQYHPVPVHAARRFTINPYSPPDYQY

SEQ ID NO: 164 - protein, 674 aa, Schizophyllum commune
MSTSPANSSDAQSTKKKRACDYCRLKRVICHPQSNGEPCPRCLEKGVCTTTISTTRKPRGQGKKALAKEAKRRQEAEAAEAEASKATSVSVKQAQPSIPPSFPDDIYFIPGDLMRDALEMAEMEPGGSPGLSPVPRQRALLDSRGWDILALAPHDRVLALCLLAMASLVSVDPTYVGYHPQGGRFPDAHTKWETISFSRLGDPEMIALGQRRRAICAQLYGEAMRQATLSGTMSHACRENVTSCGLLNMLDVHKSESNLPWATAFVWQLRTLTELDVADKIFEISDGHGRELASFQWRLGLLLLVSNYAISAGKNLPSVHDEELICVVEPPSIEDAIVQASTRPGAVPVIQLMHSTKRNIQLIRDALEKVVGHARRRPPDDLTVMHQIVAAEQHHPVLMRVRRLIYARVVGPGQQVLLHTTAVAFCVLTVALYNALHSRAGEVDRSTAMTVQLVARARALAVRAIADAVREIRSIVVQHWLPFTQRSGFEAWAKVLVDDDGDAASLDSGQANAGEFVVSVDERIETLELRKCIMFTAFIGVDRTEFVPAIDAKLDLLRARLAQQRSASHNSTPCSMPDGFTSTSSRPSTESWGSDPSLLTPSLDQSQTPSFWISPPNDWDFTSEDWMSQLAGSSGLSQTSEGHAGPGAASDFDFLHNVGMAGGNMDASLRAPWG

SEQ ID NO: 165 - protein, 661 aa, Schizophyllum commune
MADSSTTQNGLKRKRACDYCKARRVICHPDPDGCPRCIEKGIQCTTTILPRRPRTKRARVHSPEPADNPEPEEESPSGGTSSSLALYKPSSFGGCNSHQTISHPLASTFDTIPGSLLQDALDVLSRMMPGGSLLFPVRRYRKVMQNCDWDVRLLAPQERVLTCCFLAFASLVSVDPFYVGHDAAGNRFPDTHLCWDKVSQKWMDEANVREAGRRRKPVSVRLYGEAVRQAHQDGISSQASRENAASCFMLNLLDVVYDSQSTMPWASAYIWQAQTLAELTTRDALSNGRSTLDSDVERVQWHGSLLAISAYSVSVGKSLPFSPHDEVLMTGPAPKGIEEVLAQVNELPANQGVLQAIHSFGTRCVRLTRDAIENIVGVTALQSPLDELEVMRHVTAAEHFYTTVLRFSRFIRSAGTTPSLQLCVFSSTSSFACLAVALYRTIRRRVCENAKRVSGSPSRLTEWCKRIRTLAARSVITAISDMRGVIAAHYLGMFQAGGFEAWAEVFLPIEKDEPLDESDVTTEERAHALASLREMIEFSVFTGVERTHIVTDITAELDKIRVGSSRASNCSSSSSDSDTSPGSSLHTTTDGLASGFDGVATASSSTAPCEPSIFTQQGKGEPDPLEWWNYPTSEENWSDMINWMEGTDIGVGDMWMGHAAT

SEQ ID NO: 166 - protein, 900 aa, Schizophyllum commune
MGGDHKCSVCQATFTRPQHVARHMRSHTGDRPYKCPQCGDQFARSDLLSRHVNKCHPEHKEGDTGGGNAQQASSTSRRKGISASRATTSKQACDQCVQNSLPCDGCNPCAKCVQRKCRCTFVKFHRQTAPSGPGHTHPHTTAGYGVKSDPLGLGIGGMSAAALGLPIGMGYDALGGSSGTSSISSSLGSTSSMPADYSFNPVFDLDIGGPAGGGTNSKYGAVAQNEDFAAKYRQQAELLRQMGNGNPGTSSSYTGGSQVASGGAGNWWPTASSTSFPGTSSAALAGTPASLPSARYALLDELPQRGRFEATVGNPVQQRRASIPAEWPDRHAQLMADRRAQQPLHGQQGSPQFPQQGSPFQDAPHPSQQGSPYQAGGPFSHSPPFAQPAGFPQYAQPGSHQGSPYVGEGSFGSQHSSPYQPQGEWGAPMEGMRQPMASTMPGQAPMPGQGQASMPGQSMEGIRGQPMDGLRQQQLVEQHMADQRQQQLVENRLAEVRKIPGVNGWDAQMGMHRGGEAGSHSSSPTPSSSLSRHSSLSSRSSVSVSRHPSTSDRHAVAAGRHPSYGSNDGRPYSSSGASDQQEGGFSSAFGLMSLDDPAVLAGLATDGAEFFSAEATSGAPGTVPQQNGRPRGVGFMSVDDLTPMPRTGGLGLGSPSKLGLASPSRAEETQELKDFWKAYIQTPGGSGGRSAGMNGGFDLNNVATSPTGYRRTRVSSLPSVKTPTAEGAGGVGNDAKQRTLHGAAEDLRSYEAAVLARKAPVNLNLVPRIRRGTNSSKEKASPKDMHGVASSANQSPYSSASPSPHTGHVSFAPMHQGTQPFPSQGGSGGGENMLRPSFKRLASSTLEPELVKKRNTIEEGDDPFLREVSSSNASPYSSVENSPAPGSAPFAAAQAGLMQA

SEQ ID NO: 167 - protein, 806 aa, Schizophyllum commune
MSFLDYDEARMTALMRRRLQAQKLPAAFIKTRVDAYVDAVSQLIESVTVAYNLMDEEDPNRETLAACCQSQIDAWADEMTAPPDVPTPPQELQDPEAQPVNLLKRARRPLLDRYFDLNAYPSVTDKKALAAHEGATYRQIHVWFQNRRAKARAMNIPLRKCDTSPEMASALLEQALFEDDAEEQSPFNEPLKSDTDDMSLPWMQDQPSAVAESPRARLQSEFNTGTPLHQSVSRHRPSRDSRRSKPVDMDDLITAFDAMNVRGAGTRTAIGAEKGYAARTAITYVAPKAPLPSYIPPHQLSYAPPMMTSGKPALAAPTQRKLLGLPKRKPAARRRLTSMSSDSSRSSSPSSDRVPSLTYSDSSDSSSSPSPEPPTCFESLPSPPSPTWVDLPSPSFPIIVSPPGLIAHETPSSLTWREDAGAEGDDEDDSWDRAAQRAMLGPSKPRRKTSKQKTARPPSRPSRSRSAVECARSPASDPRPVLPVASDDVVFNGVTTAVVQDGIERLPGWDELDLSILDVDPTTAGELDIQIGTWDSSNATLPASQCDFGPVATFGDAPSAPVAEVQSEPEREQTVDESPANTDVDSSAWATQLSGWNDNSSLITVDNLGFNADFAPSAFDGFIASNWNLEPAQEPSSTPSTLFGRPGFEASNVASTTQSATDVTASNPTNPSTLGATVPETTFTFGSESTQPTFKFGASTSTASAAATPTPAPTSSSSALKSAVPSTTFTFGKPAATQRSNSKAPSSSTFTFGAQSTATPTFAFSSTPSTFRSSLPSVSSSSFSCAPSSFAFGTGLPGPFTFGISA

SEQ ID NO: 168 - protein, 870 aa, Schizophyllum commune
MAPVTFKNTVQSTSAVKKKKKPPACDYCKARRVICHPQPDGKPCPRCVEKEVTCTTTPVVRRKPKRRTEGDSDQAASAPAPSAAAHSSPSTSSSARARAKSRDKSGTPPAKAPPAASASTSTNNAVLAWRDTHNPLPPPLVQELMKLFPFVPQSQLPIVPYRRIYDKLEACGWDPVQLDVQSRVLAQCIMAVTSRVSTHPALVGADVSDAQLAGFLSSGNLMMTPGLDLRELGRRRDPICRRLHEEACQLAHEAGIMMMASEENAASLYLLDFLESSTNQYDNPTTWTAAMTWQMRSLAESEEYAELFGVNFRRLHWPVQLMNVALLALCAGRSIPFTEHDERLLCGPAPPNIEAATFSLANGPVTGKNIGAFLYPFLHHVIQLARQSSESIIGPYAKRFPLNEAALINHISAVEALQKTCVFLHDCIEFAIPRVRQDWVRPALANGYFITGLAMPSLLVPLHRELRRRLAEGSVSVLHRGTDGIGEYSLDTTDRTRHRIELLHRQVRAMALHAIASVTKRARDLPSLPYLTHLHCSRFASWTHMLLEECDGDEISIGERYATLERLCDILRLDGFAWVDRSGSLPAVEAEMALLQAQQQLVPHYNRPDVPNGWQDDLAMTGNPAAYDDSAFGAMQADGPRNDRPPSDSHVYDGAWNLSINNHAPTLPGASITPDFPGAPAGMPGLLEDSQMLEQALLQSSIPMNFESYAAPGLDGGVFVIEKSVKKEERRGSDGGPAELNVLERVPEYTTLEKTVPVVDLISATLRCNVEMQAQNTQRRQVHATEEYRRVYLRLKFQLLESRQPGPLILSLLRAHEPQGKRQDAQLGEIDQKGGGFYGFHRRADAKYLELGPGKNGPARIAVQLNVYQS

SEQ ID NO: 169 - protein, 1311 aa, Schizophyllum commune
MTDAPSAFDREPSSHSVVEHSPNLTFSETSSPASKLAEDTSSMKRKKLPACDYCKARRVICHPQPDGKPCPRCEEKDVTCITTPTVRRRRRTRKEIQEERERNAQSRVPCAKSSPSSVPFGGSPQSRPAVAIATTGPALSSFAAQAILSWRDANPLPGPLVTELIKLFPTVPQSLLFSIPYRRLCSKLENCGWDLALLDAPTHFLASCILALTARISTHPMLIGTDVSDPRVLRFLASGNLAVTPGLDLRGLGRARDAQCKRLYDEACRLATETGVSMVPTEESAAAYYILDFLESSTTPYDCSLTWTALMMWHVRRVAESDDHHDLFRDSYRRLHWPIQLLNCALICLCFGRSFPFTEHDERLICGPAPDALEAATITLSHGPITLQAIGEFIYPYLSHAIRLARESSEGLVGPQLPAYARRFPLNEAALVAHVSDVECLQRACDLLHDCVETIIPRAKRGWVPAALANGLFVTSVAVPSILVPLHRALKRRLAEGSIPTLQTGFGGDGGGPGQGGGQYASDAAKRIRALHWKVTERTRDLPSITYMTHLQCSRWISWIELAAEECEPMDMTPLERYKMLDRIVTIMRIDGFAWVERFGTVNYIKEAMTRLEGQQQLALHRKHPGVSSTWLSYTGKARNGAAYERGHATFGRSPAPSAVYEGRPAYSPTLHNYPSGSSASHSLNPSGTTSMGGMLESESQMLDQALLGPTVTSPADLDSSSSPSNTSDMAQNVSKNAAHAAATVRRRKKPPACDYCKARRVICHPQPDGKSCPRCIEKGVECTTTPTVRRKRRTREQIEADEAASLAAASTSIHFANSSRPEGMSGCGSASGSSAASSPSALLSWRDAHPIPLPLIEELIKLFPMVPQSLLFVGPYRRLCDTLEAYEWDLSRLDAHARVLAYCVMAVTARISTHPMFIGADVTDALVLQFLSSGNLAITPGLDLRELGRNRNAFCRDLYDEACKVAFSTGVSVISSEETAAACYLLDFLESCALRSRFLVLTHVIHLARQSSERLIGPHARRFPLDEAVLFNHISAVEALQSICSILHNCIEAAIPKAQRGWVRPALANGLFVTGLAVPSLLVPLHKDLKRRLAEGSIEVPQSDPNSAGGCYPDTASQARERIGSLHRKVRVMALQALSQAMERTRDLPGITYMTHLQCSRWAAWIKLTVDECDPTDISPLERYKMLERMATIIKLDGFAWVDRSGALFPVKAKMDDLYAQQQLVLSRRDSGVPSPWPGGLQITQDEEISGRDDINNGGSRRPSESAVLGDAQDLLGQSYSSTDVALDLFSTANVGVTPGDAHFLQQAFF

SEQ ID NO: 170 - protein, 671 aa, Schizophyllum commune
MSAPSDVVPHSQKKPRNRHSPSQVAALKEVYDKNDHPPLEDRTQLAQKLGMQIKTVNAWFQNRRASSRKRTQRAEAHTDPSRSISGSPPPLDEDDPHHTSQDHSHSSQLHSTSDQATSHTAKSDMTRKPQRNRPTPEQLDELRKLFETTQHPSTEQRTQLAERIGMKYQTITNWFQNQRSVYKNKRAPGNPNLLWGSSSLSTTAPAVSAPAQPLPPPSTHPSLGLSGPPPLSSISAHPRLPSLPISRGASLEPHHLAHGSKPEDNLSDRGSMRAFSDDGHLRDRSDTPLSTAQHSVSSFDRLRPSTPPISTFHGQSPSFGPQRNLTPSPARVKRANSSPRHAKPTSSYPRNRPEPSQLDALRKLFAVTQTPSVEQRTRLADDIGMDLAKVTNWFRNSRQTSRRRQAKGLPDPPPPPSDGKEESVSGSAKPGQSVADDDEVMDGSVEEDVEMDDSNSSRGTPMSTEDESDMEQDVHLPPLDITSRRLPPPLGMTGPRDADGPMIVSPTPIAHLRSRAFGLGLDVPEHGRQMMVDYKAQAASGLPMSPVPILPLPTPSMHVAAPPTSRGLYTPPPLKHVTPPAHGQPMLPSIRLTPPLRQTPPPYPPQAAYAHDRPFDLPLPKADRMSIDQSWASDVSMKDSRSSISSSASVRVEDAMLLLDFSTRSVELVAH

SEQ ID NO: 171 - protein, 948 aa, Schizophyllum commune
MSPHETPAGESQQTLEQQLEHRKRKSDRACDFCRRRKSPGDGDQIARKSCSNCTINNLKCTYHDTAKRQVISKTYVEALERRIEELEAQLERREQLSANEEGESPMTMSSTRPSSPHTPSITQEQMRDMARAMIRTGTRHRHEDPKDGEGVEGPAIPGSIEFERGEYNPQDEDIIERFRHVQLNTSIFNRFLGKSSTAHLVLKLISLKKQPDEPYRVPATFLNGRRSRYWSARPWECALLSTESVEYEFPEEDLMRTLIDLFFNNVHLYFPVLHRPSFEEGLRNGRHHTDHDFGAIVLCVCALGARYSEDPRVLSEEYDMDSHSGGWKWFTQAEKTRRPIFGAPSLQEIQSYCLSILFMLASSNLMTQHIWTRIGVAIRYIQDVGAHRRTRKKIPTIVDELWNRAAWVLVALDRNLSSILGRNCAMPDEDFDIRYPMDVDDEYWYNPERPEESWKQPADKPSKVACFIQYIKLSRITEVAIRTIYGTNKYGFLKKFMGEGWERDFVQELDSALNQWMDEMPRYLQWDPEQQDHQLMNQAVFLHCSSRQTQILIHRPFITAHPLAANPSFPSLTICTTAARACAHILDQQKRKTGAGLPYVMFAASVSAIVLLVSMWTRVKPRSPRDQLKELKDVHLLMDYLKSMEDRWVTAGRTWDVLDELCSIGELPNSQLGKRTRDGADDASSERPNPNHHTKHDEIGYDRVHPRSDPKLSAQAMGPSQFAQGPVDICVGPMHHSGVGPPPPMQNGLSASTMYSALTPDQLGYPAGACDAPPAVSGTGNWFSSPTSGSSGMAGTSMGSARHASMDSTAPRGSMDSIGSMDSLGGRGSMHSTTSSMDAGASFDSPPGWGSFGEMASTGFTGSPGMGEANQLDPDGMTIWQSVPPAFDPNDWVTYLAGLAEVANNDQSGQPVVQQVGGEDTVVFPSSIQDGSNFYMGNPSYPSFDPSR

SEQ ID NO: 172 - protein, 903 aa, Schizophyllum commune
MSSREMHPPPSPLDPALSMYAAHPTTFHSSASSAPLPQRLPRNYHPNGGSEATSPVDGNYGNGYANGSGSSNMNGKRPASGSSMMDSRKKARQDADAESVNSVSSSSARSPTADPGASDAPKTKATRGSRACTVCRRLKMKCVGAEQGPPCKRCQTGGHECIFEESNRGKRSSKKHEILTRSLRKMERTLDTVLRSIGNPSLASGMISRSPSPTQTATTQALIGDHNDPHNSDQEHHHMNHHNTDGQYHQLHHNGHHMHTPSDHYATPSSPKLHSLPDNSLNPLGLLAEASLANRRAQQNVPPMGSAGQVGVASANYFKPGPISILPLRRLYIERQVQPEMLSFVRTEEVVALFKIFFERMNMCAHVLDPEFHTPSLVCSRSPFLLTTICAVASKYYDANPELHPRLSELSQKLAFSVPAKGYKSVEIVQAYLLLSLWGSGAVERYEQDKTWLLLGMAIRMATDLNLHRKTAVNSEETQEGRARDYEVHNRERTWIMCFVLDRSFSAQLGKPYSIKEDNIVRNVTSWCRSPIANVGDGALAGYAELQRLMSRSLDFLYSATDSRSGLHMDIDYMLVIRSFESQLTAWKEQWIAIPPGPPSRWMLYTKSIAQFYFNYSLLVLNGFGLQNALERNPVDMGHFFGRCHSAATTCALIVRDELAANDFLRHSPDSHCVLISYAVLTLLKLLRPEFQPFIETEQRTLQLVKDVADVLNAAAAHPLHTPALYAGFLHALIAAKLEPHQPSGADATSPNDHNMNGGGPTLSHNGHNQHNGMNHGEPFMMNEFAFDSEMGPGAADISTFPPTMGPAPTEEGTDPGLNMDSILNGFWESVLVPGYNSSDVMSGGFVFGPGGSGLITPRLGLTPAHSGHNTPSRGAGMQGPPVHHDLSSKIHAAFDGSSQQSG

SEQ ID NO: 173 - protein, 438 aa, Schizophyllum commune
MPHRVDTRPEPYPTSMSAVHSPTPSASSSAPTPPLNGHAHNHSPRPYPPPPPAHYPERWPPQPPYEHAAHYPPAPGLPPPSVYSHPPPPPGAGGPPRGYEYASNAYAPGPPGPPIVHTDDASTKLSDRVRRRCFNCCTTDTSTWRRSTLSPGKVLCNKCGLFERTHSRPRPEQFPHKRGPLAAAAAGGRSPLPPHAQHGPPPPHAQPYPPPPPSGPPPAGYSLPPIQHGGPPPPGPHGSPGALPPIQSQPYQYVHTTHIAPIDAPGDRARYDAVRQYELQRPGPPPHDSRYPPPPPPPQDAPRYGTPADGARYPPPPPPGAEPPRYEDGRVYSYPPPLEPGRYPPQDPYQRPPSDGPRYPAPPDNRHPPPADGGRYPPPPADAQRYPPVPKDDGRSPRLPWIGGDEKEREKQEVKREGEERDQERREKEAAKQEAEEK

SEQ ID NO: 174 - protein, 687 aa, Schizophyllum commune
MAFADFTHSGSASPSSIHSHSPNLSPSSDSRSLSPAPRTNDERRQTPASKGARGGARRAIDRPRGTAGTGGCWTCRLRRKKCDEEPEDGQCKTCKRLGIECLGWGSKRPDWMRDKQAVEEYKANIKAQLTRAGLIRGQPRGPRPDGDDRPSRTSRHRLSNTSGHSPSSSATSEEFGLPNMPGASHFAFSDPTVNVLDVNSLDLGTSFFSAYDTNPVGAMGPNLPTSMADFDFPPVADDVGFNFDVHAPSPVQQSIPLYSGQSALQEEHVLYYFQHVRTMKYFFSSDTAASITYSLIMQDPQSAVTHAVCALASLHYTQMRVAQGLEAPDPNAVHTNTRFFQEECHFQLASAKQMRGHNESDAIAALHLVSYAQMSGGAVDWQPLLVIACDWLQQTGLPKDENPKLQYRDMSPAAKLAVRATLLMDVFSSMSLGRAPRFMPLFQRLTSKTSAPGYWAGQVQGAEADGRSAGLGCDGLNGCPDDAVYGLGEVSALAQWKATEQARGSLSLRELMRKGDDIERRLHSHFSDAPSPEDTLQDAQLAQLMAHTPVASIPTFPDDDTRRLIANIFRESTLLYLHTVLSGSHPAVNEIVSTVNRMIQLLHQLPASLYDRLLIFPIFLTGCLCADAAQRNFLKTRLQAQSEASGLVDMAGIVVMMETVWHERDINKRPIDWQQVVRDSRLKVLLL

SEQ ID NO: 175 - protein, 560 aa, Schizophyllum commune
MSTVHVVAPVAVHSVPPAQLLPQTATPPAYAQTLGGEAASTLAQKKKSPPLSANKRKRSETADDSTDQESNTPSRKSRDGPKKKKANRACFHCQKAHLTCDDSRPCQRCIKRGIANNCTEGHRKKAKYLLDDEELEELKRKQNTVPSRKSEPRTEKPKPSEPPAQTAQAPAAPLPRPSLQAQAQPVPISAPAPIPASTSEPFAPNDPMFNLTFDSNFPFGSEAANLEYTILSAILGNPSPPDTTSPPPQPYPWPSDTLSFNSPQLDSFSSFPENVLPVISADNLLSSTGSLNYLQARTAKQQSTADPADLQCGDDASKYTRDGRCSSPPSFYMDKESAARTLLSPPPTDSPGSATSTVPLNEVAPFPRPGSHLQSITDRVKAPYDYTEGYHFLMKHLTTRFEKNDILRVVRALAIFRPSLIALQMPLSWDDEVFVERCFQRSLLELDKLISYSGTPTVVWRRTGEICLVAPEFCMLTEWSMEELMGQKKYIYELFENQSVVEYWENFAEHAFENTTQSVYSHCVLLKPSGAPVPATFCFSIRRDLFDLPSAVIGQWLPLL

SEQ ID NO: 176 - protein, 422 aa, Schizophyllum commune
MPPSLIPTAATPRTRNWQEMEHYPGGSQDDLDDEYEASKREMDAQFYQTFPGARVHLERLGIIKPGMIEPMKPSQYQQYLEELQITARVHAPLPSSPVSLFDTIYGFSHSSLEEDASYGSAASGCFAHNGEAEQTSSGYQPASQFGECQTTSYGQVDYSLSDWYPNAASDDQSVSPAVAADYPHPVPQDVLTSPQAYVEYPPAPPPITPTSPTFATTPIPTDHAPHATHPPPSAPAIDTAHEVPTVSVSSPPHYQPSPPRSYEDLTPSPAREAEAAAAAVARGRRHHTMQNRRGRVALPPLEKPAASSAEKPPLACLFCRGRKIACGAPAAGSNTCNQCARRGLTCVYPTENRRGTRTRQPTRRSPQPRGRKRDAPPPAPGVEGMQIYEPDSMWPSRDEKDEGEDDDDMAGAGALSSSGREA

SEQ ID NO: 177 - protein, 723 aa, Schizophyllum commune
MLPRSASIPSPTHALSQPAHPQQVPPPPFYPDQRSFEPLEYGHRHPSHFHGHPYLQHPGQPMDILADYRTFFPYQPNEVKHRRRTTAVQLKVLEGIFKTETKPNAALRNKLAVQLEMTARGVQVWFQNRRAKEKLKASKASKAKEEKSNADKADASPPSPSNPPTGGSSSSTTTPAAEESKSDQSAATTPPTTPPSKPDSPPDSSAISPPALTINVAPSEPPSLQSPWQAPASGGSPAQHTLPVAPVPSVDDAALLAQRRGSLPAHLYSTVDPSSDLLSVHHDQFARRRSVDASLQRLPYNPYAPVARARNGMHSGLNPHRGPAQRGLCPPMARAISMDARRFSVDVVPSAQRMYSRPSPQLPYSRPSLPNGSLTSLPNGSRPSLPNGTMYAYTQRPVPPSPIPGPLPAPNFSFGAPMPPAESEQDSPRREDFDGHPRDFDGQSLASSYAASSRFGSLASISTTDSQHTYYSDVTDPADYALRRASMTSNQFLGMMSNLDVSDNSGEQCYSGKQAGYPGAQGGMYGAAQAQQQQQTSGEAAHAVYTSEAAHAAYPSPAPTLSPKDNALGMGPAHMQRAQSTMQSEQQQAYEQQQQQQAYDQSRSYEQQQPSVPANQSSCSPPDAYYPEGSLQVQYPDMYETGISPSGHYVPATSYSVPAYPLDDNYMGGYTATDAGYAANDAGYGVNDASSRLEFAHPPDWSTGYSPVAETAPCDLGAYVRYQ

SEQ ID NO: 178 - protein, 676 aa, Schizophyllum commune
MSVESPPQAPSFGHPGQHDIISEIFNLDLFAPATQNDSHPSSASNDSSPQSQYSHLATPSPINDPLHTFPQTHPGEWDFSSMFGGDQMKDDIFGSGSAVLSAFEPSPMVDANYAQPTMGIDPQLMESPTAETDESPEPATAEEQQSSPPEPQPAPKTEEKIMLTIQPVKAAGHGSKRQGTVASGGITKTRASRKAPPPSPVVHRAPSPTPSDDMMGEEDWRPSPEVLAKMSSKEKRQLRNKISARNFRIRRKEYITHLEFDIAERDRLLDAIRTDLTSTQSENQALRKEVEALKQALLAGRSGAVELPPPKELVSVQEMMEATSGNNARPSTPPSSSDDNLVKPNTQKDLSPNANSAFWGGWGMGGGVTPVHTVLVPSPFEKDAQRKDLQENINPAMNENLNPNLNARVSDIAPKAGFDGFADREMFTMKSLDAYRMHLWSKMAASHPQQQRPTTPYSPSSSHTSPSPPSSPSPFYTGPAANHSPYLSGLAGALRPAYFKAPVTSPSLSSLLSGKHSGSGLSSMSSLAAALPTPKEERAKLPSAHEEKQHKEAAAAAMVASQTVLGKLGSAFWDAFSGSNSGSASSSHGASLDSDKVRRVLEGKAVLKVVDVDTAPTQAPKSPSPSMASLKSSTSALKPIRPTIREKRSSEKCASTMSMTDMLEESMRSLSLGRRA

SEQ ID NO: 179 - protein, 354 aa, Schizophyllum commune
MTFFRTVRLVVDDAEYDFPLPEVGMSEYEIPRPGKDGKIARPPNQWIVWRSAFMKACVSYGKMLPGGLCTHAHRIWDGLPKEEKLPWALEAKRIADEHKRLYPDYKFHPIHDPAKRKARAQQKKVAAAAQRSTSPEDESEMYTPTPDGASSQRSRMPSPAQYTSPSGSHVTYGPGSLSSASIYAGGPAIRLPSPQGAHGQQPRGVKQEANPSTARAMPSLALSPHWYNTQGEISLPPLRLDPSDRRGASHNLPSLPSFLTSPATTNQQSSDDDDDDENMAPVAKVRRTATTFEDSRRTATNIWPATAAKWPAQRQPREAAVASCPASGQKRGRCPSWTALSNYRYNRRVSLCDK

SEQ ID NO: 180 - protein, 518 aa, Schizophyllum commune
MLAMQPGPSDDVSVLSQPGYRTVLVLLAKKENVRDALQAAYRPPVEPRRSPNGFMVFRSWYNSIMGPSCTLQQRISMAATDVWRRMTSAERALFMEESERRKTLLFAEHPDFEWNAKAKGKKVTKKQRASKGAARARRAAVVRPQDRSPSTPAPAPGPLSGAEEGLYRGSVTPSCCTPALSPSGSSVYEYTPRRDNHALPSARWTRTPAPVMPAAMMPQVLTMQEKPFGYDDFAQMVAIGEELGPLAYRPHVEYGPSVNMLGLNGVQDFPTATIGFDTQLDYTPSPSPLPLGDVVSWTPQQAAIGLSFFPEADIVAGPSTPIVPTASQDFPTAPASFDTQHQLTPCPSPLPLDEDVHWTPEQVAIGLSFFPDADTVAGPSAQTAHTAPHPAPEPQAERSGPIGPPFAPTPSLLLDQPVFPTSEIGWNLEGFSPQPASLPAQEASEAVQPGLEENWLNLERCSDEPVAVVAGPSNRDEEWQPYLSLAQRAIEGQERTRRAYHPYRYPYHQQLWWHRGYY

SEQ ID NO: 181 - protein, 591 aa, Schizophyllum commune
MPLPKEGKPFLKMMEDAVREANSKKQAELLVPISQLKVWEQAFQSLNTKDIPAQADWHTFALRMREATGGLELFSAVFLLSQEASTQAALRVLCKGFETIWPSAWAWIQFLDPLSGPLDLQPNDHFLLSCTVPGALVAALLLAFKDGSRQTLATLGGEPLEKMLALWYHDYGIDASNAALVEIERGDDLGVHLRNQGSQHILARYLLQRDSPYHERTVEVLHRLCGGRPGRIRRRLLLNLERGLRSRHSIDNGEFSRTYTEALVRLYDVPAETYYIPPPSKRTVRRITGHLLRLSQVPDTTIRAVSMCTVLLCFCKREGGERIVRLALPNGLLVGLRNIVSHLPLLPPSKVNNCPKIGETFLTIITTAIRLRRVTREMVRETDILLASAKVSESNILPMRWAQFLEAKKMHTSAWKAFRKRLNTVRRCRHLECTEQAPSVRSCVCREVYYCSKDCQRKHWRQHRMECPGERMRELTLEDRIYLEEVTRCHASNNYTHLTQKIGRPEIMAKIKKGCDFKMHVLYDEGTPNVKFKVNTVNGGAGGDAGRVMLYLVGHLKYGEVEYTLKLDPEPLEGFVPAVARQLIHRLRPRA

SEQ ID NO: 182 - protein, 174 aa, Schizophyllum commune
MSVAAEAQEAGLETGAGDVGDISAAEGVEDVSEGLEDAGTGSSTAPPAGPSSRRASKIHPCTVCQKVFTRPSALDTHMNIHNNSKPYLCKYPGCESAFSVKSNMKRHRRTHSEEFHDSMEAAEKAQNTATGPVFDTPIIVEESRPASSSKAVDLQWMPPNTVSRNARYSGNDKT

SEQ ID NO: 183 - protein, 286 aa, Schizophyllum commune
MTFLSLPLHSLQYAEIVVRSMDPDVDFSNLSFSVRPTCPPSSPLTNVDNVDVQVRAVCDARGSYLSICLGRPSGEPSSLSAPAIESSPSPPWSIGSDGSSDGNEALLGEFLQSARRTDEFLDALHGGKAAWGNDANGFSGASGSPSASLSSPYGFGGYFSGSFDGLPSPPLTASSSSAGYSDPEGSPFAYGCTLDDEIPISGSSEAVKRARSVAKMIPVSRKKPALKCHYPGCDAHFSRQHDRMRHEVNKHGHKCEFTCDTCRRFFSNASTLERHRCTGVPPAMAA

SEQ ID NO: 184 - protein, 287 aa, Schizophyllum commune
MTSRKRSSSGFVQSQGGRSTRRRADAAPAYHGNETHGGEIALNSVGATAAETAVSPGAGEAISPVQRSSTTSSIPALVATPSHVGPSANGPFVQYVPGSSNRPRNGPPHVCTVCDKHFMRPSTLATHMNIHSGATPYICGFQGCHARFNARSNVTRHRYLHGAAFAQKQGDIETGRAARGMTVFVEPVVASPSGIPMAPPNGPLVSTRVSASSYEMAGEFGAAWSVDDAGSSNEVGPSSAQQPADHEVRWMPVNQVSRGRTSYSPIAMTGSRGSKKQHRNAGPRSEG

SEQ ID NO: 185 - protein, 1348 aa, Schizophyllum commune
MDRPGFHPKVASTSVARAVRRAVEPTTGALARAAKRTTTLVRNAFNPHRTSHETTLARLQAQQPPTPDPAPASTPDAVPPHAPANHRAAWAPAEDHADGYEDLRAQAAAFPASVRHLAATVEHPSAREAAASAAAASDPAQSTPTPASAPIQRKGMDDLVRRRNLPPTDDPQVQRMLMNQQLKLASTLEKEGISVAELLKEINEHVEQHQSRASPKTISGRNLILARWMLLYIQVYGDRPLDYAWDPEIVQELAPRFLEFTLKFVLGVRNRKRPLKSRTVQWWMALLCQSIIRYVTDPKKDFAPCGVQLLIEQQLFDTLSDQVVSLSNRFNLDRSPTRKLFFGLWEVLIMITGALEDMRTAPNPLYHIQSIIKILLPFYLTVRPTTIGPATQELLAQGFYIKLADIGIFKEEKGYEVHFTLRAFKGHFQSHSDRPQRMVVRSVQRPELAPFDLPSWLIVYLISIGAFQDFTTLDEFEASDVCQRHIKQEFLDYPLCCAANEGGHELLIDIPAMAHHFSDNCRVLCRRNGLPQGGTHMVRRGSAHEYALASDAVTSGLILHHKPSGDTAVQREFYSPGAEGVDVTALRLSTDPHISPASLQRIQDHHQQFSVAIDTLARIANDHVSYVEYGPAAAIKEYKQAANKAANERGDAHPEVVQAEAARDNLLPAYVALYDMPDPPKVFAITKVRTMFKHATTPTVKKPIASFKLGVTEEQASQQLALINAKHAEYQQVKKKHRSLEKDDDARVITDRALANNKEGTVAERQQARSFLHDAPSLLTANIIKDYRHRTAVMLTSEDQMADALDLDGADEDAVFAETCKSRPIVQVHRGATRARNAAAAAATAAQKAGAGQAEVAAAAQAATAQVARAQVEGANDELDAEGEDDVPVVPVEETTVPAVQDDGVEDDLNDPWTVAEAGRTLGTMSSLDTLCIFKRILFSFVIAQRLAPHVKVTSGPKKRVQYYICTLCAPLRAHLNKHHIKGTSAPELQETFKTKSQLTNHQKTQHLNEWRETLFTIARDGRRLQCPGCKLHKGSLDRLVIHMRFRCTEKAKYAQMFDDYREIRCATKGHTKPKGLIRRKGILDETTDVSDTDDDWSDWDGSDEDTPEVMPEAAQDAQDMPRVSPRPTAAAAAAAEDDDDDESQPSAQREASDGDESDADDRLDDGDESFVDDASSSSEGNSSIIGADDDEYMPWAAAPAVDDDDEDEERSFANISLLSDQQAMLMQDYETFSMILEGQFDGLGANVLQAVYEHSKTMLANAGGHIDIAPAEWQAALARVDAVEVPGAVEMDDLMEDCQNWISQMEARSPDLSSHQTHLAQVFATIRRRSAMPTIGMHEWEDAGHLL

SEQ ID NO: 186 - protein, 575 aa, Schizophyllum commune
MSSPSSPTYPTFGGRSPYSSGSSASFPNEDSPGPDSAYEPVQNHDEPVVVASPSDYSYHLAIPGMAVYASQSDLHYPSDEHDAFSYPTSLMSAWNTDAKKRSLQHLYPQQQQPPSHSLPELDRSYKTLMAYNQQQAAQQSYQPQSSVSHHLPSTQSYYELDGGDSWQAYPSSLGQQHLGQQQQHLGQHYAGHGYAAVKQEEPAMSISSHQQQQQPRAVPQSMHAYQSSANMQAFYDEPHSQSYRSQHASHVTIPSSFEQQFVHLSDVSPVESSVSPVAGMQQPQPQYPSDMTVCDPHFVSGRRQREERYGTDRTSEPQGERDGDGEDDAEGEEDESDRGDEDVDMDGDDVAELEDDDEYVIRRGRRNSAPSEVGESRSLRLRSTPMRTAAARYNPYASESAPLRPRRASSMTAASSTSSTATLDDMYLPTLNGQPVTTRRRPRPATSLPIPVPVPNLTKKSRGRRVPTAPTPDSARLATVVRANADGQLQGGGRRGSTKGLRLYTCKVAGCGKCFARGEHLKRHVRSIHTHEKPHKCPYPGCGKDFSRHDNLGQHMRVHKDYVLPKGVSLNSFRA

SEQ ID NO: 187 - protein, 269 aa, Schizophyllum commune
MDTSSDQHQDFGYGPPQISWLPSDPAALAFDEAYASEQQPHFPPYAYDTLPYGPPMDPFSLDYFYTFPAFSTDSLPDPGFPSTSQPDGPAVNHTEPENNAQDVGCNAEGKRLANEELCEHSPGLAFDEPRDEGDDVGVPDLGPGPDATTAVNEATARQADTGSNDAIGASLPESSSAHRDTVSTPSRRSANAARRANPFGNTIPCQWSGCKSTFTREHDRTEHMKLHYNLQEYWCDVGACKQRFNTASLLRSHKFRIHGIRPAPRASSI

SEQ ID NO: 188 - protein, 253 aa, Schizophyllum commune
MESELSHSWPETLYPPTTGDNEIGGSQALVARGDVDTRHWAPVNNDSEPARTPSPEMFVGGFVFELLESNSSLPTNEIELGFESTIGAHRIPNTRYTPTENISFPTPQIPSSTALIVQPSPIAHTPCGAVAVSSGVAMEMGAYHSGFGPTLGAYPGEVSFDNEDQLHWREVGSTAHTNASMRRRRPGHEPHPSRTCPRCHRSFTRTHNYRDHIRRHQDEGNFRCSKPGCSSRFNTRNGLRSHLQRIHHDPTRL

SEQ ID NO: 189 - protein, 705 aa, Schizophyllum commune
MDEYAAVRVCKWFQCSMRFDSLDDLRDHVVQAHVRTAQPLPRRDVALYRRIEEGMVRSLSLNDPETYESNPHALKRRRVEKEDLEPWQYVNPADTLPSPTSERLEYPDEDEQDIEDAVMEEGRASPERQELSYPSEGERSPSPPPAAPAVPPNINLLVPPRRTFASLSSPTSSQGSISPFPNSPSIEEQIARHREKKAAKNLPTSMEARHSTASQSSSSSREAVETQLTATLDWDAQSDSMSIQQRQPSQSESVQQESQTLDSQHTTKPSQAFDATQMQDAYAHELAWSQAPAPDDPASASATQTTGTEAPETQGSLPDTQEQLAYPPDEPSTSQPIAQSLSVSPTHTSSPMSANASSVQYSFVTPSQSWYHIPRKRKVSGKRKRQSIDDRSRSGSMPQEESEESNKPAPTSPSALSSKLTGGGASVQNSTPSLPQKTPASATAPPPVPEPSQFRDKTIASAKAPPRDLLSKVLTSSQSPATPQKARTSRPPSVRSSTPKRFTPRPSTPRDEQSLPPLPSSDEDDSPPPLPRPPRRDPAHQPPRPISISPSPSPRTSLSPPPSRHIASPPPCQSTVARASDNKFVSCAMSIFPDGDPYVSTHAPAASEAPHYTIVDDDDPERYIGGEDPDEYEEEYEEDGGAEREQDDSYGDEEEEGDSFERQGGSIEDYIDVDALEELSYPDSYPPLQTQAPYQSQSQSYSQYY

SEQ ID NO: 190 - protein, 496 aa, Schizophyllum commune
MSIIVNESNESVAKRIKKTSLDKRRLPYDKWPQELKDEVMLKPAHIDLELEVYDLRPWNDGLVVFRNNACFHPKCDGKPVEDRTEHVRQHFSHPETRAEYQKYECPICALQYKSLGPLKNHINANHTHEESWTCPRPGCDTVVYSSALLKLHERLQHASDAKSASHAVTQGEGAGNGATSQGDSSSAVPKITLGKRRERSIGAGERQAKLKSRRTEVDMLADSREASVESDGEPVEFQDIPLAWQVVAQSRSREGSQDAGLGELPDNGGAPTAAMPAPPSSLPESSTPLQECPYFADLTPLAPPEALVDTISDVASWPELDWGQFEPLVPTEPPTGFPTAPPSSENPSQPPAPPLVHDTPAPPPIDSFITPWETHPIDLGDMSLALPAECAPSSHSAPVPSAPPRALDATVDGEQPTLPDDGSSVHPLDEWWVNALCDPLMSISELPSSIFSLETMQPSSTGNAASGSSSMTPIGTFDVCSRAAARQDAAARGGAS

SEQ ID NO: 191 - protein, 403 aa, Schizophyllum commune
MNTSATASDNARPVVGTRQRKLSIRPSTLNVRRQGMYGTEETVAELDSLISGSSRGTAQEPSPVYPTPTSIRSPSGTSRHARLPSGSSTSVIGAPGRASNVDAERRPRQTQSLTPAQELAREYRQSLARSPSPPRHTRHLSAQVPGPKGSRRMDSNGNRLSKYDDAYFATKTKVDEASIAGVKSLLMQDTQSDKRSSVLSSRTRSMYETASSAGGSWVMPTPPSSHFDSAVELKSPPRATSMASPPSSALLERRRSKPLPPIICDKPVSASPVSSATAPNSASTITANLLTPKIRSTESRAADMQELAEIAARIVVQQGKGPNDRVRCPIPGCRDVLENAKKLALHLHIHELDERIYDPNAHAVRDLSLYASTGGLPVPYTVRSSNTSPLKETFSHIMNALKP

SEQ ID NO: 192 - protein, 508 aa, Schizophyllum commune
MSTADDRAIACLAALVSRPRFAFLADRYVALAEATTRLQSVLQSTDKKIQESKRARLPVNASRAGISRGGQEVDVQQDTVSDGISGQLSAEARRTRSTPLRGLSRKPSLSWGDADKGDMLELPAASLNAQNQLPPPSSPQAPEHRVCNSCACLPALEASPMLNNEGYVAISTDEGPLCSAESNVMAGEGSGVSEPRGTIVNGTLRRNEACAEADANMNAMSSLFSASTATNGYQSPTDDLACADSRASLSAAVVALSSTSPQLQQMEGKLAMQLPLSSAQDLRLSPQRSSSLPPSVHQVSFRSRGAISPSGAENSAWKDTPRKSARLAAQSHSAGMHDAPSSRPSTALLASSPAAADFEADPPSKRRRSTRLASTDDHSPSANDQCSPEIDEALSSQSDGDESYIDEGDPPSAGDLTRPYACTACDVAFTKASYLQRHLRDRAHNSEGGAHRCTLCGARFVRVHHLRRHLSSAAHGDERGFTCSVAGCTQAFTRREHLKRHLQNVHKR

SEQ ID NO: 193 - protein, 355 aa, Schizophyllum commune
MTAARTTTAARINTHIRATRTRNRSLKSKAYSCPRPDCRSAFMRKADRDRHMRHVHGGIKKWSCDWPGCAMKFAHEGAYNNHMNTHTGAQPHACRICDHRFGDPSSRSRHMRERHLQPGSYTCCISGCTKQLKRRAAFVDHFKKDHHILDAEERFDIDSMAPPLRTMEEAYMLHNRVPMPSTSSAHEEEEDEVVAVPCAPAGYDCGYYGQPDPYVAYVEPYQPIPPYDYGYYYDAPYLPPQQPYGYEMSPAGSWDQYASSSSSSSPASSRESSSDPSLSDQSPGPFANIKLRQESPDFFSPPAPLDASEPFVDFTTIKREDNTADLLVSDGYDGYDGYGYSSPVADWDLQLTPTA

SEQ ID NO: 194 - protein, 310 aa, Schizophyllum commune
MCSPASCIALAALRVTPVHIPVPALFGGIADSRRADDLDSQYWLNDDDLGGIGQDVPDPYSRDSFSSGYASTSSGLSYGNPRSCLPYADQYGGANREPEGPGVLSWAGSPALDGSNGVWPYPSSDAPQGWSPDQSLYGASVNTSDIDGGDGYMPRRLSCSSQSSYASSYSSPYSSASSPSSSPVSLPVLTPPATSHGPPVKDPKPYACPIPSCTKRCKTQHTLSVHLRAHSKPKTRPEFPCSVPGCHLHFSRRHDRLRHEVAKHNKTTDVHRCRECGHVFSFKKTLGNHRCSAAAGKTKWVGNNSTTTVA

SEQ ID NO: 195 - protein, 581 aa, Schizophyllum commune
MSRTFAYVWRASIAGVKGPSLPPKPDDMNEPQYVDLLWGKGCHYCGSMTRITTSWYARRRYCKECLPVQFKHYEDLSGTIISLVKDGYELSRFIPHIYADVSDRHWRFPVDFLRRYSKEFRERKISIQDKDAVAEWVCEKTLHCKELQRHSREFAKWEQQCQDDRKAELERKRDLREQAIIKRLTDMGWGDEIAQLPDGALGAQKSVRTVQPLTEKAWQALSRNLVQFLKDQRVERFRLQEERALESRHELLLEVYPEFRLTKPFGAILPGPCDIAKSDLFLDAVKAVPFDQDMPRQAILDVLKSLPQSYFDDWRTQREQELIAFIQKRIDEPISLPVPARTVAEAIGTRTVTRDILSLATVNFWYGMDGRGITCPSVLMWPRFGVHHYDDSWYSWSTERIHFANVGQLMALRMVELLGKDPHKTTAEEMDRLDPWYYIDKPGSIKDGMHIVYSWRCVFHNFTDGADRYLKLLGEDDTKVARTQFADRDCTRLRFKNKDSLCAHCDARFSASPELWSHLFTAHDIDSPRWRDFTPGVDVHYTHFKHARLPAPKSSLPFAPRVPRLAKGARIKLIQGDAPWI

SEQ ID NO: 196 - protein, 313 aa, Schizophyllum commune
MPVFCDFCGVSFRTDNALHQHCRDRADHPYCEDCERVFQSFNGLSQHRRTAGVHQDDFDDEEETDSEYYYYSDSTEEIPRIPAGRPCVPTVITYEDDEDEDDYCTSCKRTFVNKAALYQHLADSPAHNWCFICHRDFRTEGALAQHNNSPAHYGRDLTCPLCKNMFKVPSAIALHLESGCHGYHRHTITAAVQSLPITNTISLSRRIAGPGGTRAPPKAITNYAATERSFNGSAYECFICRRTFRTLSSLNSHLASPAHDANEFTCPKCKRCFKLISGLVNHMESEVCGFARLRQVKDEMRALVDQFSGLLTL

SEQ ID NO: 197 - protein, 312 aa, Schizophyllum commune
MSLLSLPIHSLQYAEIVVRSTDPDLDLNALSFSVRPTAPPAMSLTSMANVDVKVSTVRDASGTYLSISLGQPDEEGAQNSLPIAYGDRSSSSRSSPSSWSGTRKHLGPFPARLDLTPLSTEPYYKEYKEMFGRHNLPMDCDEGFIGSLNMPPGSWPVNDGNYSDTSASGLPSSGPMGYYHRPSFDEFPSPPSSASSCTHLSDTENTFAYSPEDRMAPGAHSSIHPPKLQRSRSATSYPTSKILPVTRPKRTALKCEYPNCDAHFSRQHDRLRHEVNKHGRKCEWTCDVCRRFFSNASTLERHRCTGTPPSDW

SEQ ID NO: 198 - protein, 860 aa, Schizophyllum commune
MSDNATLFAAIIPPKPFRPIAYDQWPPELKQELRGVPKVEVYDLAENGFLVVRNNECGICHELVKGQRNLQQHARNHMPSHMTPDNSWRCPVCMGTFAQKVGAQTHINSMHTHETRWACRHAKCKFVCLDRATLNRHESRCQHRPSAVMEPAGVVKKKAEPKCRALQVQPPVKPRPLEAPSVGSKPCPLAAPSVDLKPRPLELPKLEPKQRPLDPPRPSVEHKQRVFELPPVQLPSAELKPPLGLPPMQLPPAKSPSNEQPAVEPPLMDLSVPSLFPKPGSSRSLLNPKSPSPPPSAQRTEPAAEPVEPPARSAQPFVQNVRPPTEPVQPSLRPAQPSGQPEQPPAPPAPLAMPARPPVTPPPVIWNVGPPALPIHVPAHPSIQPTAPPQVPLHPPRPSARHSRPSLSIPRELLNRSRLPREPPEFSFKTDDDPVFPSLRGPQPWRVPRPSAPSLLKPFSVWYEGLAQASAPVKSEPPKARANPPPTVRNDLTFVNIAFHNLPPASVMTPVKSEPSNNPPLPDTKSSVPPDDTSVQDSPLGFDKPEERLTEELLPPGSLIPPKATLRCNDDNTVDLGDGTKLAFVNGVCTYPDCGLKFSRCKRDWTRHAMVHMKYENKKDLSWRCGAEGCGKLYSTKHGAKEHFFSMHTNARPYTCQICHHTFSRVDAVRKHMRGIHGQIKRKTQQLYRPSSMAGARARAANNAISAGLRKTSTCASSSDRGSSVDSSVDDASSGGPSRKSSVASRTPSTESLAAPVASRRGSATSRSSTPAVDAPQCPSPSHPRPTDDAMATDDEGTVQGEEPPPKYHWQEMPSSSLRPVKLEPTDDDLVSVVEFDVDSGDESDIPIEIEYDDESMDMD

SEQ ID NO: 199 - protein, 221 aa, Schizophyllum commune
MTFQCEECPHQCATKEKLRQHNIQRHHYYCATCKLSLGDKHALRSHNNSLVHEPRQWACPLCSTKKKKRGKGNFKTPSALTQHLESGIHAGVTRYHIIAATQALQTPAPVALHATPGIYSAPAPMKVIGGVATKASSWTGTAFQCDKCEKAFRTLSALNQHLASAVHDELEMICPGCTTEFALTSALVRHLESGVCGTATYASVQANARALIDTVSGLLKG

SEQ ID NO: 200 - protein, 352 aa, Schizophyllum commune
MEIEEEERKPILVDGVAIPPSMRFDKGHPLTLFSQRMPAVDWFERNEAHARELGIWIEEPPVSGTSESRASLATHERPLTPGNVSDSSGDVPLHQQTKRAVRSHGGRPTKASTIGRPVYLSTDAREESIPVEWEVGMSGRKRKRRVSATPMTDPDEGYVSWASESEADSDYKSGKAKPARPKGHTAPKPKPKPKAQSSPRKRTRTTKHQTPAGTFRRGRPPKHEQPIPSTSAFAGFEELPDELKIEPAELAPPMTDTRCPHCNAKFGRPADVRRHVAYICPALQGKRSLKDCTCSRCGAVMARPDALERHHKSAFDCVDGTPRTVWPMGRPEPRSFPKLGTRRRRRSGGSAK

SEQ ID NO: 201 - protein, 76 aa, Schizophyllum commune
RRKIEYVPFAREVDTFGGRDLAALEKYAEEARRRPIRDFNDWGNIDVDHLIMSLRSRVATELSYALTTLSMLSAMR

SEQ ID NO: 202 - protein, 56 aa, Schizophyllum commune
KKHVCTTCNKRFNRPSSLRIHLNTHTGATPFRCPWPHCGREFNVNSNMRRHLRNHT

SEQ ID NO: 203 - protein, 124 aa, Schizophyllum commune
IAMHFAKHSAATALIDGWKSVELCQAYILMSIYAVPARRWEEDRSWLYTGLAIRIATDLNLHQVSTAKPSSERHEREILNRTRVWLICFNLDRSTATQFGKPSTIKEDYIVQHAKDWYKKSKYN

SEQ ID NO: 204 - protein, 135 aa, Schizophyllum commune
LSPRRLALLLMVLSIGSLVDLKRPLGYLSAEAYHHLARASVCEIPLMEEPDFDTVHALFFMIWYHLIFSDNRKALGYAWNLLGFVAKLVQGVHRETSGSSKLIPEESERRRNIFWELLNLDYRMSLTLGRPPSIS

SEQ ID NO: 205 - protein, 71 aa, Schizophyllum commune
VQHTDDAASKETQYLRRRCFNCHTTEPPSWRRSTLNPGKIVCNKCGLYERTHLRPRPLRFDELRAGSKTRK

SEQ ID NO: 206 - protein, 61 aa, Schizophyllum commune
KKKRKRADANQLRVLNDVYMRTAFPSTEERHQLAKQLDMSPRSVQIWFQNKRQAMRSTNRQ

SEQ ID NO: 207 - protein, 73 aa, Schizophyllum commune
DYRTFFPYQPNEVKHRRRTTAVQLKVLEGIFKTETKPNAALRNKLAVQLEMTARGVQVWFQNRRAKEKLKASK

SEQ ID NO: 208 - protein, 57 aa, Schizophyllum commune
FTKRKRWADLLVTELADAIILVLGVPNPKILYCGAAVEELLGWRDTDVIDLDLTELM

SEQ ID NO: 209 - DNA, 1000 bp, Schizophyllum commune
catgacaccgattctcgtcctgtccgcaacctgtgacgccgatcgtgtcctcgtcttcgcagtgggatgggtcaggacgggtggaccccgacaaatagttgacttcatcgcaactcatcgatgaccgagtaggttcccttctcggaaagtatacgcagaaaagatgcatttcagagctcccattttgggtccgcgcaattcaaagcaccgtcatcaggctcggcgcgccgtcgaaggccgtcgatctgttgcccgtgtgcgctgcggcagtccacgttcgaggggcggtcgcgcaggcctgggccccggaggcgagtctgtggtggcaggcgcgcgcagggcggccgttgcggtcgacgaccgagcgcgcgccacccagcctatcccgcgcgggtcgggacccaaaataaggcggccccgccgcgccccgtcgggcgagcgggtgtgtatctacgaacggaactgggaggcgactcggaagagtttggttagaaaggggaacaccatcgcggacggcccagtgctctgggggtcgcagctgacgtgcattgtgttcaattctgacgctgtggcatgtaaggaacgtgctcgggatcggagggtggcgcgagagcctcttcggtgtgagattagtaactgtactgcgaagccgcggaggggttaggatgagaggtagacagggtcgcagcccaggtgcgagaaggactgcgaaggactgttcttcgaccgcgcacctgcaattgcgcgcatggatagaatagagcgtcgccctcgagggggactcgaccagggctggtggtggcgcccgacgggactggctgggcatttgcagatggcgcgcagtccaggccgccgccgatgtgttcatcccgttttgtcagtatcgatcggatctttcgggcgtgggtataaaaggcgcgccgcccgccgtctccctctttctccagcactcccatccagagcacttccctctcccatcgcatcccatcacacaataatg

SEQ ID NO: 210 - DNA, 33 bp, Artificial
  primer
ggcctaataggcccggatgctttctcggagagg

SEQ ID NO: 211 - DNA, 33 bp, Artificial
  primer
ggcctcgcaggccgagcagatgcttcgctccgg

SEQ ID NO: 212 - DNA, 33 bp, Artificial
  primer
ggcctgcgaggccccagtcgacctcaattagcc

SEQ ID NO: 213 - DNA, 33 bp, Artificial
  primer
ggcctattaggccgcccctcacccgtgtacccg

SEQ ID NO: 214 - DNA, 32 bp, Artificial
  primer
ggcctaataggcctggtcaaggcatcccgcag

SEQ ID NO: 215 - DNA, 33 bp, Artificial
  primer
ggcctcgcaggcccttcttctcaagcccaaatg

SEQ ID NO: 216 - DNA, 33 bp, Artificial
  primer
ggcctgcgaggcctactctcatgcgagacccac

SEQ ID NO: 217 - DNA, 33 bp, Artificial
  primer
ggcctattaggcccgtgggttgttgaacttacc

SEQ ID NO: 218 - DNA, 32 bp, Artificial
  primer
ggcctaataggccacaagcagcagaggcttgg

SEQ ID NO: 219 - DNA, 29 bp, Artificial
  primer
ggcctcgcaggccgattcggacagtcgag

SEQ ID NO: 220 - DNA, 32 bp, Artificial
  primer
ggcctgcgaggccgactataggatggtgagcg

SEQ ID NO: 221 - DNA, 32 bp, Artificial
  primer
ggcctattaggcccaaacggtgtcgggaacgc

SEQ ID NO: 222 - DNA, 33 bp, Artificial
  primer
ggcctaataggcccgtttcctagtacacctgtc

SEQ ID NO: 223 - DNA, 33 bp, Artificial
  primer
ggcctcgcaggccggagaacggggtccagcagg

SEQ ID NO: 224 - DNA, 33 bp, Artificial
  primer
ggcctgcgaggccagaccaccgaaggatagttg

SEQ ID NO: 225 - DNA, 33 bp, Artificial
  primer
ggcctattaggcctcgttgctatcaggagcggc

SEQ ID NO: 226 - DNA, 32 bp, Artificial
  primer
ggcctaataggccaccgtcacgtccatgttcg

SEQ ID NO: 227 - DNA, 30 bp, Artificial
  primer
ggcctcgcaggcccgaaacaacaatgattg

SEQ ID NO: 228 - DNA, 33 bp, Artificial
  primer
ggcctgcgaggccctagatgttcggtaattgcc

SEQ ID NO: 229 - DNA, 33 bp, Artificial
  primer
ggcctattaggcccagccacccatctcgacttg

SEQ ID NO: 230 - DNA, 32 bp, Artificial
  primer
ggcctaataggccttgagatgttgccttgtcg

SEQ ID NO: 231 - DNA, 30 bp, Artificial
  primer
ggcctcgcaggcccaagagcaagcgttgag

SEQ ID NO: 232 - DNA, 31 bp, Artificial
  primer
ggcctgcgaggcccacgatctacccaaacag

SEQ ID NO: 233 - DNA, 33 bp, Artificial
  primer
ggcctattaggccagatccaacgtgagagccag

SEQ ID NO: 234 - DNA, 32 bp, Artificial
  primer
ggcctaataggccagtgctggtgagactcacg

SEQ ID NO: 235 - DNA, 33 bp, Artificial
  primer
ggcctcgcaggcccgattggtacgagctggatg

SEQ ID NO: 236 - DNA, 33 bp, Artificial
  primer
ggcctgcgaggcccattctcatatgcctcaaac

SEQ ID NO: 237 - DNA, 33 bp, Artificial
  primer
ggcctattaggcctcgtctctattcacaaccgc

SEQ ID NO: 238 - DNA, 25 bp, Artificial
  primer
ggccgaatgggccgtatgaaggaag

SEQ ID NO: 239 - DNA, 25 bp, Artificial
  primer
ggccccgctggccctgcaaacgaac

SEQ ID NO: 240 - DNA, 32 bp, Artificial
  primer
ggccagcgaggccaggtccgtgatcctttgtg

SEQ ID NO: 241 - DNA, 31 bp, Artificial
  primer
ggcctattaggcctgaagggcggtaatgctg

1. A fungus or a mushroom in which expression level of a polypeptide is increased and/or expression level of a polypeptide is decreased, the amino acid sequence of which polypeptide:
(a) is at least 40% identical or similar to a sequence selected from the group consisting of:
(i) SEQ ID NO: 56,
(ii) SEQ ID NO:1 to SEQ ID NO:55, inclusive, and
(iii) SEQ ID NO:57 to SEQ ID NO:200, inclusive,
and/or
(b) is at least 50% identical or similar to a sequence selected from the group consisting of:
(i) SEQ ID NO:202,
(ii) SEQ ID NO:201, and
(iii) SEQ ID NO:201 to SEQ ID NO:208, inclusive.

2. The fungus or mushroom according to claim 1, wherein the increased expression level is attained by increased production and/or higher activity of said polypeptide compared to the expression level, production or activity of the polypeptide in its parental fungus or mushroom when both are cultured and/or assayed under the same conditions.

3. The fungus or mushroom according to claim 2, wherein the polypeptide with increased expression level is a heterologous polypeptide.

4. The fungus or mushroom according to claim 2, wherein the polypeptide with increased expression level is an endogenous polypeptide.

5. The fungus or mushroom according to claim 1, wherein the decreased expression level is attained by decreased production and/or lower activity of said polypeptide compared to the expression level, activity or production of the polypeptide in its parental fungus or mushroom when both are cultured and/or assayed under the same conditions.

6. The fungus or mushroom according to claim 1, wherein
(a) the polypeptide whose expression level is increased comprises an amino acid sequence that is at least 40% identical or similar to any of sequences SEQ ID NO:29; SEQ ID NO:177; SEQ ID NO:20; SEQ ID NO:56 or SEQ ID NO:4, and
(b) the polypeptide whose expression level is decreased comprises an amino acid sequence that is at least 40% identical or similar to any of sequences SEQ ID NO:55; SEQ ID NO:21 or SEQ ID NO:54.

7. The fungus or mushroom according to claim 6, wherein:
(a) the polypeptide whose expression level is increased comprises an amino acid sequence that is at least 50% identical or similar to any of sequences SEQ ID NO:204, SEQ ID NO:207, SEQ ID NO:208, SEQ ID NO:202 or SEQ ID NO:201: and
(b) the polypeptide whose expression level is decreased comprises an amino acid sequence that is at least 50% identical or similar to any of sequences SEQ ID NO:206, SEQ ID NO:205 or SEQ ID NO:203.

8. The fungus or mushroom according to claim 1, that is an Ascomycete or a Basidiomycete.

9. A method for producing the mushrooms according to claim 1, comprising colonization of a substrate followed by the production of fruiting bodies.

10. A method for producing a substance of interest, comprising culturing the mushroom according to claim 1 under conditions that are conducive to the generation of the substance of interest.

11. A nucleic acid construct comprising a nucleotide sequence encoding a polypeptide that comprises an amino acid sequence that is:
(a) at least 40% identical or similar to any of sequences SEQ ID NO:1 to SEQ ID NO:200, inclusive; and/or,
(b) at least 50% identical or similar to any of sequence SEQ ID NO:201 to SEQ ID NO:208, inclusive;
wherein the nucleotide sequence is optionally operably linked to a promoter that is capable of driving expression of the nucleotide sequence in a fungus or a mushroom.

12. A method for identifying a stimulus that changes production of a mushroom, comprising the steps of:
(a) exposing a fungus or mushroom to a stimulus suspected of changing mushroom production;
(b) determining expression level of a nucleic acid or activity or steady state level of a corresponding encoded polypeptide in the fungus or mushroom of step (a) which polypeptide comprises an amino acid sequence that is
(i) at least 40% identical or similar to any of sequences SEQ ID NO:1 to SEQ ID NO:200, inclusive, and/or
(ii) at least 50% identical or similar to any of sequences SEQ ID NO:201 to SEQ ID NO:208, inclusive,
(c) comparing the expression, activity or steady state level determined in step (b) with the expression, activity or steady state level of the nucleic acid or of the polypeptide in a fungus/or mushroom that had not been exposed to said stimulus; and,
(d) identifying a stimulus that changes said expression level, activity or steady state level of said nucleic acid or polypeptide in the fungus or mushroom that was exposed to said stimulus compared to the fungus or mushroom that was not exposed to said stimulus,
thereby identifying said stimulus that changes mushroom production.

13. The method according to claim 12, wherein the expression levels, activities or steady state levels of more than one of said nucleic acids or more than one of said polypeptides encoded thereby are determined and compared in response to said exposure.

14. The fungus or mushroom according to claim 8, that is a Basidiomycete.

15. The fungus or mushroom according to claim 14, that is an Agaricales.

16. The nucleic acid construct according to claim 11, wherein the nucleotide sequence encoding said polypeptide is operably linked to said promoter.
